(19) United States
(12) Patent Application Publication
(10) Pub. No.: US 2024/0293531 A1
(43) Pub. Date: Sep. 5, 2024

(54) INACTIVATED SARS-COV-2 VIRUS VACCINE

(71) Applicant: Valneva Austria GmbH, Vienna (AT)

(72) Inventors: Andreas Meinke, Pressbaum (AT); Michael Möhlen, Rockenberg (DE); Robert Schlegl, Siegenfield (AT); Jürgen Heindl-Wruss, Viena (AT)

(73) Assignee: Valneva Austria GmbH, Vienna (AT)

(21) Appl. No.: 17/913,638

(22) PCT Filed: Apr. 6, 2021
(86) PCT No.: PCT/EP2021/058974

§ 371 Date: Sep. 22, 2022

Related U.S. Application Data
(63) Continuation-in-part of application No. PCT/US21/20313, filed on Mar. 1, 2021.

(30) Foreign Application Priority Data
Apr. 6, 2020 (EP) 20168324.0
Oct. 15, 2020 (EP) 20202118.4
Dec. 4, 2020 (EP) 20211853.5
Feb. 1, 2021 (EP) 21154647.8
Mar. 5, 2021 (EP) 21160913.6

(51) Int. Cl. A61K 39/215; A61K 39/00; A61P 31/14; C12N 7/00

(52) U.S. Cl. CPC A61K 39/215; A61P 31/14; C12N 7/00; A61K 2039/5252; A61K 2039/545; A61K 2039/55; A61K 2039/55505; A61K 2039/55555; A61K 2039/55561; A61K 2039/575; C12N 2770/20034; C12N 2770/20063

(57) ABSTRACT

Described herein are SARS-CoV-2 vaccines and compositions and methods of producing and administering said vaccines to subjects in need thereof.

### RELATED APPLICATIONS

[0001] This application is a national stage filing under 35 U.S.C. 371 of International Patent Application Serial No. PCT/EP2021/058974, filed Apr. 6, 2021, which is a continuation-in-part of PCT/US2021/020313, filed Mar. 1, 2021, the disclosures of which are incorporated by reference in their entireties.

### REFERENCE TO A SEQUENCE LISTING SUBMITTED AS A TEXT FILE VIA EFS-WEB

[0002] The instant application contains a Sequence Listing which has been submitted in ASCII format via EFS-Web and is hereby incorporated by reference in its entirety. Said ASCII copy, created on Aug. 11, 2023, is named 1042270137US00-SUBSEQ-CEW and is 661,405 bytes in size.

### FIELD OF THE INVENTION

[0003] The disclosure relates to SARS-CoV-2 vaccines and compositions and methods for producing said vaccines and administering the vaccines to subjects for the generation of an anti-SARS-CoV-2 immune response.

### BACKGROUND OF THE INVENTION

[0004] SARS-CoV-2 (hereinafter the “virus”) was detected for the first time in China around November 2019. Since then, the virus has caused a global pandemic. The natural reservoir are bats and the virus belongs to the Coronaviridae family, genus Betacoronavirus (betaCoV). The virus has a ssRNA genome, 29,903 bp (Wuhan-Hu-I: GenBank Reference sequence: NC_045512.2) encoding for 9,860 amino acids, 25 non-structural protein and 4 structural proteins: spike (S), envelope (E), membrane (M), nucleocapside (N). The virus has a variable size of between 60 to 140 nm in diameter. It is

enveloped and sensitive to UV, heat, and lipid solvents. It has 89% nucleotide identity with bat SARS-like-CoVZXC21 and 81% nucleotide identity with human SARS-CoV. Evidence suggests that this virus spreads when an infected person coughs small droplets—packed with the virus—into the air. These can be breathed in, or cause an infection if one touches a surface they have landed on, then one's eyes, nose or mouth. In addition, other vectors may exist, and the virus may be transmitted by
blood transfusion, transplacentally, and through sexual transmission. Though the symptoms of SARS-CoV-2 virus infection may be mild, and include typically fever and cough, it can also be asymptomatic or in the other extreme fatal. The key symptoms are usually high temperature, cough and breathing difficulties. There is currently no specific treatment or vaccine for this virus, and the only preventative methods involve social distancing. SARS-CoV-2 presents a substantial public
health threat. The Imperial College COVID-19 (disease caused by SARS-CoV-2) Response Team published in Mar. 16, 2020 a report wherein they evaluated all possible methods to stop or delay the spread of the virus leading ultimately to the break-down of the healthcare system and hundreds of thousands of deaths in the UK alone. They stated that only population-wide social distancing has a chance to reduce effects to manageable levels. These measures need to be upheld until a vaccine is
available. This recommendation would mean for most of the population quarantine for at least 18 months. They concluded that a mass-producible vaccine is the only option to stop this pandemic other than willing to sacrifice the elderly population. In view of the dramatic situation, there is an absolute urgent need for an effective vaccine against SARS-CoV-2 as fast as possible. Furthermore, various escape mutants have emerged (e.g. UK_B.1.1.7; South African_B 1.351; Brazilian_P.1 variants, and
Californian variants B.1.427 and B.1.429; see also FIG. 2) which further worsen the situation and thus this unfortunate development needs to be addressed as well.

### SUMMARY OF THE INVENTION

[0005] Accordingly, the present invention provides an inactivated SARS-CoV-2 vaccine. Whilst extensive effort has already been invested by research groups throughout the world in developing a SARS-CoV-2 vaccine, most approaches have focused on subunit vaccines (e.g. encoding the SARS-CoV-2 S protein or fragments thereof), live attenuated vaccines or recombinant DNA or RNA vaccines encoding viral proteins. However, there has been little interest in whole virus, inactivated vaccine approaches, and a successful inactivated SARS-CoV-2 vaccine has not yet been fully developed. In so far as an inactivated vaccine approach has been contemplated, the use of typical inactivating agents (e.g. formaldehyde) and adjuvants (e.g. alum) under standard conditions may have drawbacks which hinder development of an effective vaccine candidate. Moreover, there is a risk that such a vaccine candidate could result in antibody-dependent enhancement (ADE) of SARS-CoV-2 disease and/or Th2 type immunopathology possibly resulting from the hypersensitivity responses to SARS-CoV-2 components. The present invention aims to address these problems and thus to produce a safe and effective whole virus, inactivated SARS-CoV-2 vaccine that overcomes the drawbacks of the prior art.

[0006] Thus in one aspect the present invention provides a SARS-CoV-2 vaccine comprising a beta-propiolactone-inactivated SARS-CoV-2 particle; wherein the vaccine is capable of generating neutralizing antibodies against native SARS-CoV-2 particles in a human subject. Preferably a native surface conformation of the SARS-CoV-2 particle is preserved in the vaccine.

[0007] In another aspect the present invention provides a SARS-CoV-2 vaccine comprising an inactivated SARS-CoV-2 particle; wherein a native surface conformation of the SARS-CoV-2 particle is preserved in the vaccine, such that the vaccine is capable of generating neutralizing antibodies against native SARS-CoV-2 particles and/or other immunological responses in a human subject that are able to protect partly or fully more than 50%, preferably more than 60%, more than 70%, more than 80%, more than 90% of said vaccinated human subjects.

[0008] In particular, the present invention aims to provide optimally inactivated SARS-CoV-2 particles, which are incapable of replication and infection of human cells, but which retain immunogenic epitopes of viral surface proteins and are thus suitable for generating protective immunity in vaccinated subjects. By optimizing the inactivation process and other steps in the production of the vaccine, including the selection of an appropriate adjuvant, a novel vaccine composition can be obtained that preserves a native surface conformation of SARS-CoV-2 particles and which reduces the risk of negative effects such as ADE and immunopathology. Such vaccine compositions are described in more detail below.

[0009] In a further particular embodiment, the invention aims to provide an optimal combination of optimally inactivated different SARS-CoV-2 particles, which are incapable of replication and infection of human cells, but which retain immunogenic epitopes of viral surface proteins and are thus suitable for generating protective immunity in vaccinated subjects. By an optimal combination of different and optimally inactivated SARS-CoV-2 particles, an improved vaccine composition can be obtained that is capable of generating neutralizing antibodies against native SARS-CoV-2 particles and/or other immunological responses in a human subject that are able to protect partly or fully more than 50%, preferably more than 60%, more than 70%, more than 80%, more than 90% of said vaccinated human subjects.

[0010] Each of the limitations of the invention can encompass various embodiments of the invention. It is therefore anticipated that each of the limitations of the invention involving any one element or combinations of elements can be included in each aspect of the invention. This invention is not limited in its application to the details of construction and the arrangement of components set forth in the following description or illustrated in the drawings. The invention is capable of other embodiments and of being practiced or of being carried out in various ways.

### BRIEF DESCRIPTION OF THE DRAWINGS

[0011] The accompanying drawings are not intended to be drawn to scale. The figures are illustrative only and are not required for enablement of the disclosure. For purposes of clarity, not every component may be labeled in every drawing. In the drawings:

[0012] FIG. 1. The process for production of the inactivated SARS-CoV-2 vaccine of the current invention. Steps include cell buildup of Vero host cells, infection of Vero cells with SARS-CoV-2, virus harvest, DNA reduction, primary inactivation, purification, optional secondary inactivation and formulation with adjuvant.

[0013] FIG. 2. During the course of the SARS-CoV-2 pandemic. SARS-CoV-2 genomic sequences from isolates from around the world have been reported including the recent new variants or lineages such as the UK B 1.1.7, Brazilian P1, Californian B.1.427/B.1.429 and South African B.1.351 lineages. The accession numbers and origins of complete SARS-CoV-2 genomic sequences are provided in tabular form, along with accession numbers for the corresponding orflab polyprotein and S protein, when available (—or no entry=not available).

[0014] FIG. 3. A preferred set-up for the sucrose gradient centrifugation used as a polishing step for the SARS-CoV-2 vaccine of the invention.

[0015] FIG. 4. Total IgG in response to SARS-CoV-2 vaccine. Coating antigens: S1 (A), receptor binding domain of spike protein (B) and nucleoprotein (C). Endpoint titer: absorbance of 3-fold the blank used as cut-off (dashed line).

[0016] FIG. 5. IgG1 and IgG2a titers in response to SARS-CoV-2 vaccine adjuvanted with alum. Antibody titers specific to S1 protein were determined by ELISA. The concentrations were determined by comparison with a mAb subclass standard curve

[0017] FIG. 6. Production process delivers high density and intact spike proteins. Shown are electron micrographs of the SARS-CoV-2 inactivated drug substance produced according to Example 1. About 1-1.5 10⁷ viral particles per AU.

[0018] FIG. 7. Comparison of Size-Exclusion-Chromatography and SDS-PAGE profiles of SARS-CoV-2 and JEV drug substance. High purity (>95%) according to SDS-PAGE (silver stain, reduced) and monomer virus (>95%) according to SE-HPLC. Difference in retention time due to different virus particle size (JEV (IXIARO) about 50 nm, SARS-CoV2 about 100 nm)

[0019] FIG. 8. Study design for NHP challenge study. Three groups of 8 animals each: Two dose groups for SARS-CoV-2 vaccine (10 AU & 40 AU, formulated with 0.5 mg/dose Al³⁺ and 1 mg Th1-stimulating adjuvant per dose added directly before administration) and a placebo group (DPBS). The SARS-CoV-2 challenge strain is BetaCoV/France/IDF/0372/2020 (Maisonmasse et al., Hydroxychloroquine use against SARS-CoV-2 infection in non-human primates, 2020, Nature 585:584-587). Methods and timing of testing: Hematology on d-28, d0, d7, d14, d21, d28, d35, d47, d49, d50, d51, d54, d62. Ab response (ELISA, IFA) on d-28, d0, d14, d21, d28, d35, d47, d54, d62. T cell response (ICS, ELISPOT) on d-28, d0, d14, d35, d54, d62. Cytokine response (LUMINEX) on d47, d49, d50, d51, d54, d62. SWABS (viral load (qRT-PCR-genomic+subgenomic): nasal & tracheal swabs on d35, d49, d50, d51, d54, d57, d62; rectal swabs at baseline and on d2, d7, d15. BAL viral load (qRT-PCR-genomic+subgenomic): d50. Euthanasia: lung harvest, viral load (qRT-PCR-genomic+subgenomic): d54, d62. CT scans: d35, d50, d57.

[0020] FIG. 9. Counts of residues within the footprints of 33 neutralizing mAbs, or respectively clusters 13, 4, 10, 2, 1, 3. Listed are residues within the footprint of neutralizing mAbs and/or which are lineage defining mutation positions for B.1.1.7, B.1.351 or P.1 (marked “x”). E.g. K417 and E484 mutations which are amino acid positions in the S-protein are only to be found in the South African and Brazilian lineages.

[0021] FIG. 10. SDS-PAGE, silver stain, of two samples of SARS-CoV-2 candidates according to Example 1 (iCELLIS 500 bioreactor, protamine sulfate precipitated, BPL inactivated). The bands could be clearly attributed to the three main viral proteins (Spike-protein, Membrane-protein, Nucleoprotein) as well as to background proteins from the host system.

[0022] FIG. 11. SARS-CoV-2 Mutations within the Spike Protein of strain UK MIG457 (B 1.1.7 lineage) and strain SA_P2 (B.1.351 lineage) from Public Health England (PHE).

### DETAILED DESCRIPTION OF THE INVENTION

[0023] Embodiments of the present invention are directed to a SARS-CoV-2 vaccine or immunogenic composition comprising inactivated SARS-CoV-2 particles. Typically, the inactivated SARS-CoV-2 particles are whole virus, inactivated particles, i.e. the inactivated virus particles are derived from whole native SARS-CoV-2 particles that have been inactivated. As used herein “SARS-CoV-2” refers to the SARS-CoV-2 virus and “SARS-CoV-2 particles” typically refers to whole SARS-CoV-2 viral particles, i.e. virions.

[0024] In some embodiments of the present invention, the SARS-CoV-2 particles are inactivated without substantially modifying their surface structure. In other words, a native surface conformation of the SARS-CoV-2 particles is retained in the inactivated virus particles. It has surprisingly been found that by optimizing an inactivation process, e.g. using beta-propiolactone, infectivity of native SARS-CoV-2 particles can be substantially abrogated without adversely affecting their antigenicity and/or immunogenicity. Thus, the present invention provides in one aspect an inactivated virus vaccine (e.g. a beta-propiolactone-inactivated virus vaccine) that generates neutralizing antibodies and/or protective immunity against SARS-CoV-2 infection.

[0025] In one embodiment, the SARS-CoV-2 particles are inactivated by a method that preferentially targets viral RNA. By this it is meant that e.g. the inactivation step modifies viral RNA more than viral proteins. Thus, the inactivated SARS-CoV-2 particles may comprise replication-deficient viral RNA, i.e. the viral RNA is modified in the inactivation step such that the inactivated particles are incapable of replicating. By utilizing an inactivation method that preferentially targets viral RNA, the present invention advantageously allows the preservation of immunogenic epitopes in viral surface proteins.

[0026] Preferably, the inactivation method spares viral (surface) proteins relative to viral RNA, e.g. the viral surface proteins (e.g. the spike (S) protein) may comprise fewer or more infrequent modifications resulting from the inactivation step compared to viral RNA. For instance, a lower proportion of amino acid residues in the viral surface proteins (e.g. S protein) may be modified by the inactivation step compared to the proportion of modified nucleotide residues in the viral RNA. In some embodiments, the proportion of modified amino acid residues in the viral surface proteins (e.g. S protein) may be at least 5%, 10%, 20%, 30%, 50%, 70% or 90% lower than the proportion of modified nucleotide residues in the viral RNA. By “modifications” or “modified residues” it is meant to refer to non-native residues that are not present in the native SARS-CoV-2 particles, e.g. chemical (covalent) modifications of such residues resulting from the inactivation step.

[0027] In one embodiment, the viral RNA is inactivated by alkylation and/or acylation, i.e. the modifications in the SARS-CoV-2 inactivated particles comprise alkylated and/or acylated nucleotide residues. In some embodiments, the modifications are preferentially targeted to purine (especially guanine) residues, e.g. the SARS-CoV-2 inactivated particles comprise one or more modified (e.g. alkylated or acylated) guanine residues. In some cases, the inactivation step may lead to cross-linking of viral RNA with viral proteins, e.g. via guanine residues in the viral RNA. The inactivation step may also introduce nicks or strand breaks into viral RNA, e.g. resulting in fragmentation of the viral genome.

[0028] Suitable alkylating and/or acylating agents are known in the art. In one embodiment, the inactivating agent comprises beta-propiolactone. i.e. the vaccine comprises beta-propiolactone-inactivated virus particles. In any case, in a particular embodiment, beta-propiolactone (herein referred to also as “BPL”) treatment is particularly preferred according to the present invention, because it results in SARS-CoV-2, particles, that are substantially inactive, but which retain high antigenicity and immunogenicity against neutralizing epitopes present in native SARS-CoV-2. In particular, it has been surprisingly found that beta-propiolactone can be used to inactivate SARS-CoV-2 particles with a minimum number of protein modifications. For instance, as demonstrated in Examples 6 and 7 below, inactivation of SARS-CoV-2 particles using beta-propiolactone results in a much lower number of modifications of viral proteins compared to inactivation of influenza particles by beta-propiolactone. Thus in beta-propiolactone-inactivated SARS-CoV-2 particles, a native surface conformation of the viral particles can be preserved.

[0029] In a preferred embodiment of the invention, the viral RNA is inactivated in an optimized manner, i.e. such it is just sufficiently inactivated not to be infectious anymore but not “over”-inactivated so that numerous modification at different amino acids in particular at the S-protein occur. In a further even more preferred embodiment, the BPL inactivation not only sufficiently inactivates (but not over-inactivates) the SARS-CoV-2 virus but also just sufficiently inactivates viruses that might be co-enriched and co-cultured in the manufacturing process (see e.g. experimental part). A particularly hard virus to inactivate that can co-culture and be co-enriched is PPV (porcine parvovirus)—see experimental part.

[0030] The concentration of beta-propiolactone in the inactivation step may be optimized to ensure complete inhibition of viral replication whilst preserving the conformation of surface proteins in the virus. For instance, the concentration of beta-propiolactone in the inactivation step may be e.g. 0.01 to 1% by weight, preferably 0.01 to 0.1% by weight, more preferably about 0.03% by weight. A preferred amount of BPL was found to be 500 ppm where the SARS-CoV-2 virus but also other concerning viruses/impurities are inactivated whilst preserving (i.e. not modifying) most of the amino acids of the S-protein (i.e. only a few amino acids were shown to be modified at low probability).

[0031] In some embodiments, the native SARS-CoV-2 particles may be contacted with beta-propiolactone for at least 5 hours, at least 10 hours, at least 24 hours or at least 4 days, e.g. 5 to 24 hours or longer such as 48 hours. The inactivation step may be performed at about 0° C. to about 25° C. preferably about 4° C. or about 22° C. or e.g. 18 to 24° C. In one embodiment the inactivation step (e.g. with beta-propiolactone) is performed at 2° C. to 8° C. for 24 hours. The inactivation step may optionally and preferably be followed by a hydrolyzation step of the inactivating agent, as is known in the art (which may be performed e.g. at about 37° C.+/−2° C. for a total time of 2.5 hours+/−0.5 hours for beta-propiolactone). Typically, longer incubation times and/or higher temperatures in the inactivation step may enhance viral inactivation, but may also lead to an increased risk of undesirable surface modifications of the viral particles, leading to reduced immunogenicity. Therefore, the inactivation step may be performed for e.g. the shortest time necessary in order to produce a fully inactivated virus particle. After completion of the hydrolysis, the inactivated viral solution was in one embodiment immediately cooled down to 5±3° C. and stored there until inactivation was confirmed by large volume plaque assay and serial passaging assay.

[0032] Beta-propiolactone inactivation of SARS-CoV-2 particles may preferentially modify cysteine, methionine and/or histidine residues. Thus in some embodiments, the inactivated SARS-CoV-2 particle comprises one or more beta-propiolactone-modified cysteine, methionine and/or histidine residues.

[0033] However, in embodiments of the present invention, the beta-propiolactone-inactivated SARS-CoV-2 particles show relatively few protein modifications. Thus, for example, an inactivated SARS-CoV-2 particle in the vaccine may comprise fewer than 200, 100, 50, 30, 20, 15, 10, 9, 8, 7 or 6 beta-propiolactone-modified amino acid residues. Preferably a spike (S) protein of the inactivated SARS-CoV-2 particle comprises fewer than 100, 50, 30, 20, 15, 10, 9, 8, 7 or 6 beta-propiolactone-modified amino acid residues. More preferably the inactivated SARS-CoV-2 particle or spike protein thereof comprises 20 or fewer, 15 or fewer. 10 or fewer, or 5 or fewer beta-propiolactone-modified amino acid residues. Most preferably the inactivated SARS-CoV-2 particle or spike protein thereof comprises 1 to 100, 2 to 70, 3 to 50, 4 to 30, 5 to 25, 5 to 20, 10 to 20 or about 15 beta-propiolactone-modified amino acid residues.

[0034] In another embodiment, fewer than 20%, 15%, 10%, 5% or 4% of SARS-CoV-2 polypeptides are beta-propiolactone-modified. For instance, 0.1 to 10%, 1 to 8%, 2 to 7% or about 3%, 4%, 5% or 6% of SARS-CoV-2 polypeptides in the particle may be beta-propiolactone-modified. Beta-propiolactone modification of residues and/or polypeptides in the vaccine may be detected by mass spectrometry, e.g. using liquid chromatography with tandem mass spectrometry (LC-MS-MS) for instance using a method as described in Examples 6 and 7. In such a method, the SARS-CoV-2 particles may be digested in order to fragment proteins into SARS-CoV-2 polypeptides for LC-MS-MS analysis. The digestion step may be performed by any suitable enzyme or combination of enzymes, e.g. by trypsin, chymotrypsin and/or PNGase F (peptide:N-glycosidase F), or by e.g. acid hydrolysis. Preferably the percentage of BPL-modified polypeptides detected by LC-MS-MS following enzymatic digestion or acid hydrolysis is: (a) trypsin digestion, 1 to 5%, 2 to 4% or about 3%; (b) trypsin+PNGase F digestion, 1 to 5%, 2 to 4% or about 3%; (c) chymotrypsin, 1 to 10%, 3 to 8% or about 6%; (d) acid hydrolysis, 1 to 6%, 2 to 5% or about 4%. In this context, a “beta-propiolactone-modified” polypeptide means that the polypeptide comprises at least one beta-propiolactone modification, e.g. at least one beta-propiolactone-modified residue.

[0035] In some embodiments, a spike (S) protein of the inactivated SARS-CoV-2 particle comprises a beta-propiolactone modification at one or more of the following residues: 49, 146, 166, 177, 207, 245, 379, 432, 519, 625, 1029, 1032, 1058, 1083, 1088, 1101, 1159 and/or 1271, e.g. in SEQ ID NO: 3, or a corresponding position in SEQ ID NO: 19, 21, 23, 25 or 27. Preferably the inactivated SARS-CoV-2 particle comprises a beta-propiolactone modification at one or more of the following residues: H49, H146, C166, M177, H207, H245, C432, H519, H625, M1029, H1058, H1083, H1088, H1101, H1159 and/or H1271, e.g. in SEQ ID NO: 3, or a corresponding position in SEQ ID NO: 19, 21, 23, 25 or 27. In another embodiment, the inactivated SARS-CoV-2 particle comprises a beta-propiolactone modification at one or more of the following residues: H207, H245, C379, M1029 and/or C1032, e.g. in SEQ ID NO: 3, or a corresponding position in SEQ ID NO. 19, 21, 23, 25 or 27. By “a corresponding position” it is meant a position in SEQ ID NO: 19, 21, 23, 25 or 27 that aligns with position H207, H245, C379, M1029 and/or C1032 in SEQ ID NO: 3, e.g. when SEQ ID NO: 19, 21, 23, 25 or 27 is aligned with SEQ ID NO:3 using a program such as NCBI Basic Local Alignment Search Tool (BLAST).

[0036] For instance, in some embodiments, the positions in SEQ ID NO: 19, 21, 23, 25 or 27 corresponding to H207, H245, C379, M1029 and C1032 in SEQ ID NO: 3 are shown below:

| Seq ID | | | | | |
|---|---|---|---|---|---|
| 3 | H207 | H245 | C379 | M1029 | C1032 |
| 19 | H207 | H244 | C378 | M1028 | C1031 |
| 21 | H207 | H245 | C379 | M1029 | C1032 |
| 23 | H204 | H242 | C376 | M1026 | C1029 |
| 25 | H207 | H245 | C379 | M1029 | C1032 |
| 27 | H207 | H245 | C379 | M1029 | C1032 |

[0037] In some embodiments, a membrane (M) glycoprotein of the inactivated SARS-CoV-2 particle comprises a beta-propiolactone modification at one or more of the following residues: 125, 154, 155, 159 and/or 210, preferably H154, HISS, C159 and/or H210, e.g. in SEQ ID NO: 29.

[0038] In some embodiments, a nucleocapsid (N) protein of the inactivated SARS-CoV-2 particle comprises a beta-propiolactone modification at M234, e.g. in SEQ ID NO: 28.

[0039] In some embodiments, fewer than 30%, 20%, 10%, 5%, 3% or 1% of one or more of the following residues in the inactivated SARS-CoV-2 particles are beta-propiolactone modified: (i) in the spike (S) protein, e.g. in SEQ ID NO: 3, or a corresponding position in SEQ ID NO: 19, 21, 23, 25 or 27: residues 49, 146, 166, 177, 207, 245, 379, 432, 519, 625, 1029, 1032, 1058, 1083, 1088, 1101, 1159 and/or 1271; preferably H49, H146, C166, M177, H207, H245, C432, H519, H625, M1029, H1058, H1083, H1088, H1101, H1159 and/or H1271; alternatively H207, H245, C379, M1029 and/or C1032; (ii) in the membrane (M) glycoprotein, e.g. in SEQ ID NO: 29: residues 125, 154, 155, 159 and/or 210; preferably H154, H153, C159 and/or H210; and/or (iii) M234 of the nucleocapsid (N) protein, e.g. in SEQ ID NO: 28. In preferred embodiments, fewer than 30%, 20%, 10%, 5%, 3% or 1% of at least 2, 3, 4, 5, 6, 7, 8. 9, 10, 11, 12, 13, 14, 15, 16, 17, 18, 19, 20 or each of the above residues in the inactivated SARS-CoV-2 particles are beta-propiolactone modified. In this paragraph, the percentage of modified residues is intended to refer to the site occupancy, e.g. the ratio of modified to unmodified peptide for the same modification site normalized to the protein abundance as described in Examples 6 and/or 7 below.

[0040] In another preferred embodiment, the proportion of beta-propiolactone-modified residues (i.e. site occupancy) at the following positions in the inactivated SARS-CoV-2 particles is:
[0041] (i) in the spike (S) protein (e.g. of SEQ ID NO: 3, or a corresponding position in SEQ ID NO: 19, 21, 23, 25 or 27):
   [0042] (a) H207: less than 30%, preferably 0.01 to 25%; and/or
   [0043] (b) H245: less than 10%, preferably 0.1 to 5%; and/or
   [0044] (c) C379: less than 5%, less than 1% or less than 0.1%; and/or
   [0045] (d) M1029: less than 5%, less than 1% or less than 0.1%; and/or
   [0046] (e) C1032: less than 5%, less than 1% or less than 0.1%; and/or
[0047] (ii) in the membrane (M) glycoprotein (e.g. of SEQ ID NO: 29):
   [0048] (f) H154: less than 5%, less than 1% or less than 0.1%; and/or
   [0049] (g) H155: less than 10%, preferably 0.1 to 5%; and/or
   [0050] (h) C159: less than 5%, less than 1% or less than 0.1%; and/or
   [0051] (i) H210: less than 20%, preferably 0.1 to 10%; and/or
[0052] (iii) in the nucleocapsid (N) protein (e.g. of SEQ ID NO: 28):
   [0053] (j) M234: less than 90%, less than 10% or less than 0.1%.

[0054] In another preferred embodiment, the proportion of beta-propiolactone-modified residues (i.e. site occupancy) at each of the following positions in the spike (S) protein (e.g. of SEQ ID NO: 3, or a corresponding position in SEQ ID NO: 19, 21, 23, 25 or 27) of the inactivated SARS-CoV-2 particles is:
[0055] (a) residues H49, H146, C166, H207, H519, M1029, H1083, H1088, H1101, H1159 and/or H1271: less than 20%, preferably 0.01 to 10%, more preferably 0.1 to 5%; and/or
[0056] (b) residues M177, C432, H625: less than 30%, preferably 0.1 to 20%, more preferably 1 to 10%; and/or
[0057] (c) residues H245, H1058: less than 30%, preferably 0.1 to 20%, more preferably 5 to 15%;

[0058] In some embodiments, the proportion of beta-propiolactone-modified amino acid residues in the inactivated SARS-CoV-2 particle (or spike (S) protein thereof) may be at least 5%, 10%, 20%, 30%, 50%, 70% or 90% lower than the proportion of modified residues in a beta-propiolactone-inactivated influenza particle (or hemagglutinin (HA) or neuraminidase (NA) protein thereof), e.g. in an influenza particle that has been inactivated under similar conditions to the SARS-CoV-2 particle.

[0059] In an alternative embodiment, the viral RNA may be inactivated by treatment with ultraviolet (UV) light. UV treatment can be used to preferentially target RNA (compared to polypeptides) in the viral particles, resulting in e.g. modified nucleotides and/or fragmentation. In some embodiments. UV treatment can be combined with beta-propiolactone treatment to improve inactivation of the virus, e.g. a beta-propiolactone treatment step can be followed by a UV treatment step or vice versa, or a UV treatment step can be performed at the same time as the beta-propiolactone treatment step.

[0060] In other embodiments, the native SARS-CoV-2 particles may be inactivated using formaldehyde. However, formaldehyde inactivation is typically less preferred in the present invention, as it is less suitable for preferentially targeting viral RNA and preserving immunogenic epitopes in the viral surface proteins.

[0061] Therefore in preferred embodiments, the inactivation step(s) (especially when using formaldehyde, but also when using other inactivating agents such as e.g. beta-propiolactone) are performed under mild conditions in order to preserve surface antigen integrity, especially integrity of the S protein.

[0062] In one embodiment, such a mild inactivation method comprises contacting a liquid composition comprising native SARS-CoV-2 particles with a chemical viral inactivating agent (such as e.g. any of the chemical inactivation agents as listed above or a combination, for instance formaldehyde or preferably beta-propiolactone) in a container, mixing the chemical viral inactivating agent and the liquid composition comprising SARS-CoV-2 particles under conditions of laminar flow but not turbulent flow, and incubating the chemical viral inactivating agent and the liquid composition comprising SARS-CoV-2 particles for a time sufficient to inactivate the viral particles. The mild inactivation step is optionally performed in a flexible bioreactor bag. The mild inactivation step preferably comprises 5 or less container inversions during the period of inactivation. Preferably, the mixing of the chemical viral inactivating agent and the composition comprising native SARS-CoV-2 particles comprises subjecting the container to rocking, rotation, orbital shaking, or oscillation for not more than 10 minutes at not more than 10 rpm during the period of incubation.

[0063] Suitable mild or gentle inactivation methods are described below in the Examples. Further details of such methods are also described in WO 2021/048221, the contents of which are incorporated herein in their entirety.

[0064] Typically, the inactivation step substantially eliminates infectivity of mammalian (e.g. human) cells by the inactivated SARS-CoV-2 particle. For instance, infectivity of mammalian cells may be reduced by at least 99%, 99.99% or 99.9999% as compared to a native SARS-CoV-2 particle, or infectivity of human cells by the inactivated A SARS-CoV-2 particle may be undetectable. Standard assays may be used for determining residual infectivity and effective viral titer, e.g. plaque assays, determination of TCID50 (50% tissue culture infectious dose). For instance, the mammalian cells may be MDCK, COS or Vero cells.

[0065] In preferred embodiments of the present invention, a native surface conformation of the SARS-CoV-2 particles is preserved in the inactivated virus particles. By this it is meant that e.g. one or more or all immunogenic (neutralizing) epitopes are retained in the inactivated virus particles, such that the inactivated particles are capable of generating neutralizing antibodies against native SARS-CoV-2 particles when administered to a human subject. By “native surface conformation” it is meant to refer to the surface conformation found in native SARS-CoV-2 particles, i.e. SARS-CoV-2 particles (virions) that have not been inactivated. The property of the vaccine or inactivated SARS-CoV-2 particles in generating neutralizing antibodies in a subject may be determined using e.g. a plaque reduction neutralization test (PRNT assay), e.g. using a serum sample from the subject as known in the art.

[0066] In preferred embodiments, the present invention comprises that a native conformation of (i) spike (S) protein; (ii) nucleocapsid (N) protein; (iii) membrane (M) glycoprotein; and/or (iv) envelope (E) protein is preserved in the inactivated viral particles. Preferably, the inactivated SARS-CoV-2 particle comprises a native conformation spike (S) protein. Thus, the S (and/or N and/or M and/or E) protein in the inactivated SARS-CoV-2 particle preferably comprises one or more or all (intact) immunogenic (neutralizing) epitopes present in native SARS-CoV-2 particles. Preferably, the S (and/or N and/or M and/or E) protein in the inactivated viral particles is not modified, or not substantially modified by the inactivation step.

[0067] Preservation of the surface conformation of the viral particles can be assessed using standard techniques. For instance, methods such as X-ray crystallography, MS analysis (shift of amino acid mass by modification) and cryo-electron microscopy may be used to visualize the virus surface. The secondary and tertiary structures of proteins present on the surface of viral particles may also be analyzed by methods such as by circular dichroism (CD) spectroscopy (e.g. in the far (190-250 nm) UV or near (250-300 nm) UV range). Moreover, preservation of a native surface conformation can be confirmed by using antibodies directed against epitopes present on the native viral surface, e.g. in the S protein. Cross-reaction of anti-SARS-CoV-2 antibodies between the inactivated and native virus particles can thus be used to demonstrate retention of potentially neutralizing epitopes in the vaccine.

[0068] The surface conformation of SARS-CoV-2 virions and in particular the spike (S) protein is known, and has been published in several recent studies. See for instance Shang. J. et al. (Structural basis of receptor recognition by SARS-CoV-2. Nature https://doi.org/10.1038/s41586-020-2179-y (2020)), which describes the crystal structure of the SARS-CoV-2 receptor binding domain. In addition, Walls et al. (Structure, Function, and Antigenicity of the SARS-CoV-2 Spike Glycoprotein. Cell 180, 1-12 (2020), https://doi.org/10.1016/j.cell.2020.02.058) provides a detailed description of the S protein surface conformation using cryo-EM, and describes cross-neutralizing antibodies that target conserved S protein epitopes. The use of antibodies from sera of infected and convalescent patients has shed further light on important S protein epitopes (Zhang B et al. Mining of epitopes on spike protein of SARS-CoV-2 from COVID-19 patients. 2020 Cell Research 30:702-704). Recent studies have also focused on the structure of the SARS-CoV-2 nucleocaspid (N) protein, which has been confirmed as an important antigen in studies using convalescent sera (Zeng W et al. Biochemical characterization of SARS-CoV-2 nucleocapsid protein. 2020 BBRC 527(3): 618-623). Further guidance with regard to potentially important SARS-CoV-2 epitopes is available in the CoVIEdb database, a compilation of information from coronavirus epitope mapping studies (http://biopharm.zju.edu.cn/coviedb/; Wu J CoVIEdb: A Database for Potential Immune Epitopes of Coronaviruses. 2020 Front. Pharmacol. 11:572249; doi: 10.3389/fphar.2020.572249).

[0069] Monoclonal antibodies against SARS-CoV-2 surface epitopes (including in the S protein) are described in the literature (e.g. as mentioned above), available from commercial sources and/or can be generated using standard techniques, such as immunization of experimental animals. For example, as of Sep. 9, 2020, at least 169 different antibodies against SARS-CoV-2 were available from MyBioSource, Inc., San Diego, CA (e.g. cat. no. MBS8574747, see www.MyBioSource.com). On the same date at least 28 different antibodies against SARS-CoV-2 were available from Sino Biological US Inc., . . . Wayne, PA (e.g. cat. no. 40150-D006, see https://www.sinobiological.com/). Further suitable antibodies are described in Ou et al. (Characterization of spike glycoprotein of SARS-CoV-2 on virus entry and its immune cross-reactivity with SARS-CoV, Nature Communications (2020) 11:1620; https://doi.org/10.1038/s41467-020-15562-9). In embodiments of the present invention, a skilled person can detect preservation of a native surface conformation of SARS-CoV-2 (or e.g. the S or N protein thereof) via cross-reaction of such antibodies with the inactivated particles. In other words, the inactivated particles bind specifically to one or more anti-SARS-CoV-2 antibodies directed against surface epitopes, preferably anti-S-protein antibodies, e.g. to antibodies generated against neutralizing epitopes in native SARS-CoV-2 virions.

[0070] The SARS-CoV-2 particles in the vaccine composition may be derived from any known strain of SARS-CoV-2, or variants thereof. For instance, the virus may be a strain as defined in FIG. 2, or may comprise a nucleotide or amino acid sequence as defined therein, or a variant sequence having at least e.g. 95% sequence identity thereto. For instance, in one embodiment the SARS-CoV-2 particle comprises an RNA sequence corresponding to a DNA sequence (i) as defined in SEQ ID NO: 1 (which is also defined in NCBI Reference Sequence NC_045512.2). By “corresponding to”, it will be understood that the defined DNA sequence is an equivalent of the viral RNA sequence, i.e. is a DNA or cDNA sequence that encodes the viral RNA or a sequence complementary to the viral RNA. As described herein, the inactivation process may result in modification (e.g. alkylation or acylation) and/or fragmentation of viral RNA, and thus it will be understood that the inactivated viral particles may not comprise an intact RNA sequence as defined herein, but rather are derived from native viral particles which do comprise such a sequence.

[0071] The SARS-CoV-2 particles may also comprise variants of the known SARS-CoV-2 Wuban-Hu-1 lineage or also referred to as the reference lineage, e.g. sequences having at least 85%, at least 90%, at least 95% or at least 99% sequence identity to SEQ ID NO: 1 and/or NCBI Reference Sequence NC_045512.2. Preferably, the variant sequence encodes an infectious SARS-CoV-2 particle. e.g. a native (non-inactivated) SARS-CoV-2 particle comprising the RNA sequence that is able to pack a virulent SARS-CoV-2 virus.

[0072] Further known SARS-CoV-2 particles may also comprise variants of the known SARS-CoV-2 South African lineage B.1.351, e.g. sequences having at least 85%, at least 90%, at least 95% or at least 99% sequence identity to SEQ ID NO: 18 and/or NCBI Reference Sequence MW598408. Preferably, the variant sequence encodes an infectious SARS-CoV-2 particle, e.g. a native (non-inactivated) SARS-CoV-2 particle comprising the RNA sequence that is able to pack a virulent SARS-CoV-2 virus. Further examples of variants of the known SARS-CoV-2 South African lineage B.1.351 are given in FIG. 2.

[0073] Further known SARS-CoV-2 particles may also comprise variants of the known SARS-CoV-2 Brazilian lineage P.1, e.g. sequences having at least 85%, at least 90%, at least 95% or at least 99% sequence identity to SEQ ID NO: 20 and/or NCBI Reference Sequence MW520923. Preferably, the variant sequence encodes an infectious SARS-CoV-2 particle, e.g. a native (non-inactivated) SARS-CoV-2 particle comprising the RNA sequence that is able to pack a virulent SARS-CoV-2 virus. Further examples of variants of the known SARS-CoV-2 Brazilian lineage P.1 are given in FIG. 2.

[0074] Further known SARS-CoV-2 particles may also comprise variants of the known SARS-CoV-2 UK lineage B.1.1.7, e.g. sequences having at least 85%, at least 90%, at least 95% or at least 99% sequence identity to SEQ ID NO: 22 and/or NCBI Reference Sequence MW422256. Preferably, the variant sequence encodes an infectious SARS-CoV-2 particle, e.g. a native (non-inactivated) SARS-CoV-2 particle comprising the RNA sequence that is able to pack a virulent SARS-CoV-2 virus. Further examples of variants of the known SARS-CoV-2 UK lineage B.1.1.7 are given in FIG. 2.

[0075] Further known SARS-CoV-2 particles may also comprise variants of the known SARS-CoV-2 Californian lineages B.1.427 and B.1.429, e.g. sequences having at least 85%, at least 90%, at least 95% or at least 99% sequence identity to SEQ ID NO: 24 and/or SEQ ID NO: 26. Preferably, the variant sequence encodes an infectious SARS-CoV-2 particle, e.g. a native (non-inactivated) SARS-CoV-2 particle comprising the RNA sequence that is able to pack a virulent SARS-CoV-2 virus. Further examples of variants of the known SARS-CoV-2 Californian lineages can be found in GenBank.

[0076] Similarly, in preferred embodiments the SARS-CoV-2 particle comprises an S protein of the Wuhan lineage comprising or consisting of (i) an amino acid sequence as defined in SEQ ID NO: 3, or (ii) an amino acid sequence having at least 95%, at least 97% or at least 99% identity to SEQ ID NO 3.

[0077] In further preferred embodiments the SARS-CoV-2 particle comprises an S protein of the South African B1.351 lineage comprising or consisting of (i) an amino acid sequence as defined in SEQ ID NO: 19, or (ii) an amino acid sequence having at least 95%, at least 97% or at least 99% identity to SEQ ID NO: 19.

[0078] In further preferred embodiments the SARS-CoV-2 particle comprises an S protein of the Brazilian P.1 lineage comprising or consisting of (i) an amino acid sequence as defined in SEQ ID NO: 21, or (ii) an amino acid sequence having at least 95%, at least 97% or at least 99% identity to SEQ ID NO: 21.

[0079] In further preferred embodiments the SARS-CoV-2 particle comprises an S protein of the UK B.1.1.7 lineage comprising or consisting of (i) an amino acid sequence as defined in SEQ ID NO: 23, or (ii) an amino acid sequence having at least 95%, at least 97% or at least 99% identity to SEQ ID NO: 23. In further preferred embodiments the SARS-CoV-2 particle comprises an S protein of the Californian B.1.427 lineage comprising or consisting of (i) an amino acid sequence as defined in SEQ ID NO: 25, or (ii) an amino acid sequence having at least 95%, at least 97% or at least 99% identity to SEQ ID NO: 25.

[0080] In further preferred embodiments the SARS-CoV-2 particle comprises an S protein of the Californian B.1.429 lineage comprising or consisting of (i) an amino acid sequence as defined in SEQ ID NO: 27, or (ii) an amino acid sequence having at least 95%, at least 97% or at least 99% identity to SEQ ID NO: 27.

[0081] In some embodiments, the inactivated SARS-CoV-2 particles are combined with other inactivated SARS-CoV-2 particles in the vaccine (other=other sequence).

[0082] In some embodiments, a combination of SARS-CoV-2 particles in the vaccine comprises or consists of at least two SARS-CoV-2 particles selected from the group consisting of i) the reference Wuhan_1 lineage such as e.g. SEQ ID Nos: 1, 9, 12, 15; ii) the South African B. 1.531 lineage such as e.g. SEQ ID NO: 18; the Brazilian P.1 lineage such as e.g. SEQ ID NO: 20: the UK B.1.1.7 lineage such as e.g. SEQ ID NO: 22 and the Californian B.1.427 lineage such as e.g. SEQ ID NO: 24 or B.1.429 lineages such as e.g. SEQ ID NO: 26. A preferred embodiment is a combination comprising i) a Wuhan_1 lineage such as e.g. SEQ ID NO: 9; and ii) a South African B.1.531 lineage such as e.g. SEQ ID NO: 18.

[0083] In a further embodiment, a combination of SARS-CoV-2 particles in the vaccine comprises or consists of at least three, e.g. three SARS-CoV-2 particles selected from the group consisting of i) the reference Wuhan_1 lineage such as e.g. SEQ ID NOs 1, 9, 12, 15; ii) the South African B.1.531 lineage such as e.g. SEQ ID NO: 18; the Brazilian P.1 lineage such as e.g. SEQ ID NO: 20: the UK B.1.1.7 lineage such as e.g. SEQ ID NO: 22 and the Californian B.1.427 such as e.g. SEQ ID NO: 24 or B.1.429 lineages such as e.g. SEQ ID NO: 26. A preferred embodiment of such a trivalent vaccine is a combination comprising i) a Wuhan_1 lineage such as e.g. SEQ ID NO: 9; and ii) a South African B. 1.531 lineage such as e.g. SEQ ID NO: 18; and iii) an UK B.1.1.7 lineage such as e.g. SEQ ID NO: 22. Another preferred embodiment of such a trivalent vaccine is a combination comprising i) a Wuhan_1 lineage such as e.g. SEQ ID NO: 9; and ii) a South African B.1.531 lineage such as e.g. SEQ ID NO: 18; and iii) a Brazilian P.1 lineage such as e.g. SEQ ID NO: 20.

[0084] The similarity between amino acid sequences and/or nucleic acid sequences is expressed in terms of the similarity between the sequences, otherwise referred to as sequence identity. Sequence identity is frequently measured in terms of percentage identity: the higher the percentage, the more similar the two sequences are. Homologs, orthologs, or variants of a polynucleotide or polypeptide will possess a relatively high degree of sequence identity when aligned using standard methods.

[0085] Methods of alignment of sequences for comparison are well known in the art. Various programs and alignment algorithms are described in: Smith & Waterman, Adv. Appl. Math. 2:482, 1981: Needleman & Wunsch, Mol. Biol. 48:443, 1970; Pearson & Lipman, Proc. Natl. Acad. Sci. USA 85:2444, 1988; Higgins & Sharp, Gene. 73:237-44, 1988; Higgins & Sharp, CABIOS 5: 151-3, 1989; Corpet et al., Nuc. Acids Res. 16: 10881-90, 1988; Huang et al. Computer Appls. in the Biosciences 8, 155-65, 1992; and Pearson et al., Meth. Mol. Bio. 24:307-31, 1994. Altschul et al, J. Mol. Biol. 215:403-10, 1990, presents a detailed consideration of sequence alignment methods and homology calculations.

[0086] Once aligned, the number of matches is determined by counting the number of positions where an identical nucleotide or amino acid residue is present in both sequences. The percent sequence identity is determined by dividing the number of matches either by the length of the sequence set forth in the identified sequence, or by an articulated length (such as 100 consecutive nucleotides or amino acid residues from a sequence set forth in an identified sequence), followed by multiplying the resulting value by 100. Preferably, the percentage sequence identity is determined over the full length of the sequence. For example, a peptide sequence that has 1166 matches when aligned with a test sequence having 1554 amino acids is 75.0 percent identical to the test sequence (1166÷1554*100=75.0). The percent sequence identity value is rounded to the nearest tenth. For example, 75.11, 75.12, 75.13, and 75.14 are rounded down to 75.1, while 75.15, 75.16, 75.17, 75.18, and 75.19 are rounded up to 75.2. The length value will always be an integer.

[0087] The NCBI Basic Local Alignment Search Tool (BLAST) (Altschul et al., Mol. Biol. 215:403, 1990) is available from several sources, including the National Center for Biotechnology Information (NCBI, Bethesda, MD) and on the internet, for use in connection with the sequence analysis programs BLASTP, BLASTN, BLASTX, TBLASTN and TBLASTX. A description of how to determine sequence identity using this program is available on the NCBI website on the internet. The BLAST and the BLAST 2.0 algorithms are also described in Altschul et al., Nucleic Acids Res. 25:3389-3402, 1977. Software for performing BLAST analyses is publicly available through the National Center for Biotechnology Information (ncbi.nlm.nih.gov). The BLASTN program (for nucleotide sequences) uses as defaults a word length (W) of 11, alignments (B) of 50, expectation (E) of 10, M=5. N=−4, and a comparison of both strands. The BLASTP program (for amino acid sequences) uses as defaults a word length (W) of 3, and expectation (E) of 10, and the BLOSUM62 scoring matrix (see Henikoff & Henikoff, Proc. Natl. Acad. Sci. USA 89: 10915, 1989).

[0088] Homologs and variants of a polynucleotide or polypeptide are typically characterized by possession of at least about 75%, for example at least about 80%, 85%, 90%, 91%, 92%, 93%, 94%, 95%, 96%, 97%, 98% or 99% sequence identity counted over at least 50, 100, 150, 250, 500, 1000, 2000, 5000 or 10,000 nucleotide or amino acid residues of the reference sequence, over the full length of the reference sequence or over the full length alignment with the reference amino acid sequence of interest. Polynucleotides or proteins with even greater similarity to the reference sequences will show increasing percentage identities when assessed by this method, such as at least 80%, at least 85%, at least 90%, at least 95%, at least 98%, or at least 99% sequence identity. For sequence comparison of amino acid or nucleic acid sequences, typically one sequence acts as a reference sequence, to which test sequences are compared. When using a sequence comparison algorithm, test and reference sequences are entered into a computer, subsequence coordinates are designated, if necessary, and sequence algorithm program parameters are designated. Default program parameters are used.

[0089] One example of a useful algorithm is PILEUP. PILEUP uses a simplification of the progressive alignment method of Feng & Doolittle, Mol. Evol. 35:351-360, 1987. The method used is similar to the method described by Higgins & Sharp. CABIOS 5:151-153, 1989. Using PILEUP, a reference sequence is compared to other test sequences to determine the percent sequence identity relationship using the following parameters: default gap weight (3.00), default gap length weight (0.10), and weighted end gaps. PILEUP can be obtained from the GCG sequence analysis software package, e.g., version 7.0 (Devereaux et al., Nuc. Acids Res. 12:387-395, 1984).

[0090] As used herein, reference to “at least 80% identity” refers to at least 80%, at least 85%, at least 90%, at least 91%, at least 92%, at least 93%, at least 94%, at least 95%, at least 96%, at least 97%, at least 98%, at least 99%, or even 100% identity to a specified reference sequence, e.g. to at least 50, 100, 150, 250, 500, 1000, 5000 or 10,000 nucleotide or amino acid residues of the reference sequence or to the full length of the sequence. As used herein, reference to “at least 90% identity” refers to “at least 90%, at least 91%, at least 92%, at least 93%, at least 94%, at least 95%, at least 96%, at least 97%, at least 98%, at least 99%, or even 100% identity” to a specified reference sequence, e.g. to at least 50, 100, 150, 250, 500, 1000, 5000 or 10,000 nucleotide or amino acid residues of the reference sequence or to the full length of the sequence.

[0091] In some embodiments, the inactivated SARS-CoV-2 particles are combined with an adjuvant in the vaccine. In some embodiments, the adjuvant is a Th1 response-directing adjuvant. By this it is meant that when the vaccine is administered to a subject, the adjuvant promotes the induction of a predominantly T helper type 1 (i.e. Th1) immune response in the subject (rather than a Th2 type response). The Th1- or Th2-directing properties of commonly used vaccines are known in the art. It has surprisingly been found that using an adjuvant that promotes a predominantly Th1 response can improve immunogenicity of the vaccine and thus antiviral responses, as well as reducing a risk of disadvantageous effects such as immunopathology (which may result from a predominantly Th2 type response possibly due to hypersensitivity against viral components).

[0092] In some embodiments, the adjuvant comprises 3-O-desacyl-4′-monophosphoryl lipid A (MPL), saponin QS-21, a CpG-containing oligodeoxynucleotide (CpG ODN), squalene. DL-α-tocopherol, a cationic peptide, a deoxyinosine-containing immunostimulatory oligodeoxynucleic acid molecule (I-ODN) and/or imiquimod. For instance, examples of suitable adjuvants may comprise: Adjuvant System 01 (AS01), which is a liposomal preparation comprising 3-O-desacyl-4′-monophosphoryl lipid A (MPL) and saponin QS-21; CpG 1018, a CpG ODN comprising the sequence 5′ TGACTGTGAACGTTCGAGATGA 3′ (SEQ ID NO: 4); Adjuvant System 03 (AS03), comprising squalene, DL-α-tocopherol and polysorbate 80; IC31, comprising a peptide comprising the sequence KLKL₅KLK (SEQ ID NO: 5) and an I-ODN comprising oligo-d(IC)₁₃ (SEQ ID NO: 6); or MF59, an oil-in-water emulsion comprising squalene. Tween 80 and Span 85.

[0093] In another embodiment, the vaccine or adjuvant does not comprise a CpG-containing oligodeoxynucleotide (CpG ODN). In another embodiment, the vaccine or adjuvant does not comprise CpG 1018, i.e. the vaccine or adjuvant does not comprise the sequence 5′ TGACTGTGAACGTTCGAGATGA 3′ (SEQ ID NO: 4).

[0094] In some embodiments, the dosage of a Th1 promoting adjuvant, such as especially AS01, AS03. MF59, imiquimod or CpG, will be arrived at empirically. In some embodiments, the dosage of the Th1 promoting adjuvant will be determined from previous studies.

[0095] In alternative embodiments, the adjuvant may comprise an aluminium salt, e.g. aluminium oxide, aluminium hydroxide or aluminium phosphate. A preferred aluminium salt is the aluminium hydroxide with reduced Cu content, e.g. lower than 1.25 ppb based on the weight of the vaccine composition, an adjuvant described in detail in WO2013/083726 or Schlegl et al., Vaccine 33 (2015) 5989-5996. In some embodiments, an alum adjuvant is the only adjuvant in the vaccine composition. As referred to herein, the weight of the alum component refers to the weight of the Al³⁺ in the solution, regardless of what type of aluminium salt is used. For example, 0.5 mg of Al³⁺ corresponds to 1.5 mg alum. In one embodiment, the amount alum (Al³⁺) present in the SARS-CoV-2 vaccine composition is between about 0.1 and 2 mg/mL, between about 0.2 and 1.5 mg/mL, between about 0.5 and 1.3 mg/mL, especially between about 0.8 to 1.2 mg/mL, most preferably about 1 mg/mL, i.e., . . . 0.5 mg/dose. However the use of aluminium adjuvants alone is generally less preferred in the present invention, as they tend to direct a predominantly Th2 type immune response. Therefore in embodiments where the vaccine comprises an aluminium salt, it is particularly preferred that the vaccine further comprises a Th1-directing adjuvant, e.g. as described above.

[0096] Thus in one embodiment, the adjuvant may comprise an aluminium salt and a CpG ODN, e.g. CpG 1018 (SEQ ID NO: 4). CpG 1018 can be adsorbed onto alum and, when used as a combinatorial adjuvant, has been shown to induce both Th1 and Th2 responses (Tian. et al. 2017 Oncotarget 8(28)45951-45964); i.e. a more “balanced” immune response. Particularly, when administered in combination with alum. CpG has been shown to increase the overall magnitude of the immune response and to reduce the Th2 bias that is induced by conventional adjuvants such as alum (X. P. Ioannou et al. CpG-containing oligodeoxynucleotides, in combination with conventional adjuvants, enhance the magnitude and change the bias of the immune responses to a herpesvirus glycoprotein. 2002 Vaccine 21:127-137). The dose range for CpG in combination with alum may be anywhere between 10 μg and 3 mg.

[0097] Typically, the adjuvant is combined with the inactivated SARS-CoV-2 particles during manufacture of the vaccine product, i.e. the manufactured vaccine product comprises the adjuvant and is sold/distributed in this form. In alternative embodiments the adjuvant may be combined with the inactivated SARS-CoV-2 particles at the point of use, e.g. immediately before clinical administration of the vaccine (sometimes referred to as “bedside mixing” of the components of the vaccine). Thus the present invention comprises both vaccine products comprising inactivated SARS-CoV-2 particles and an adjuvant as described herein, as well as kits comprising the individual components thereof (e.g. suitable for bedside mixing), and the combined use of the individual components of the vaccine in preventing or treating SARS-CoV-2 infection.

[0098] The SARS-CoV-2 vaccine may be produced by methods involving a step of inactivation of native SARS-CoV-2 particles, as described above. Generally, the native SARS-CoV-2 particles may be obtained by standard culture methods, e.g. by in vitro production in mammalian cells, preferably using Vero cells. For instance, the native SARS-CoV-2 particles may be produced using methods analogous to those described in e.g. WO 2017/109225 and/or WO 2019/057793, the contents of which are incorporated herein in their entirety, which describe methods for the production of Zika and Chikungunya viruses in Vero cells. The steps such as passaging, harvesting, precipitation, dialysis, filtering and purification described in those documents are equally applicable to the present process for producing SARS-CoV-2 particles.

[0099] For instance, in some embodiments, the method may comprise purifying the inactivated SARS-CoV-2 particles by one or more size exclusion methods such as (i) a sucrose density gradient centrifugation. (ii) a solid-phase matrix packed in a column comprising a ligand-activated core and an inactive shell comprising pores, wherein the molecular weight cut-off of the pores excludes the virus particles from entering the ligand-activated core, and wherein a molecule smaller than the molecular weight cut-off of the pores can enter the ligand-activated core and collecting the virus particles, and/or (iii) batch or size exclusion chromatography; to obtain purified inactivated SARS-CoV-2 particles. Preferably, in the resulting purified preparation of viral particles. (i) the concentration of residual host cell DNA is less than 100 ng/ml; (ii) the concentration of residual host cell protein is less than 1 μg/ml; and (iii) the concentration of residual aggregates of infectious virus particles is less than 1 μg/mL.

[0100] In some embodiments, the method may comprise a step of precipitating a harvested culture medium comprising SARS-CoV-2 particles, thereby producing native SARS-CoV-2 particles in a supernatant. The precipitating step may comprise contacting the culture medium with protamine sulfate or benzonase. By using such a step, both contaminating DNA derived from host cells as well as immature and otherwise non-infectious virus particles can be separated from the preparation. Moreover, protamine sulfate can be very efficiently separated from the virus fraction, e.g. using sucrose density centrifugation or a solid-phase matrix packed in a column comprising a ligand-activated core and an inactive shell comprising pores, wherein the pores comprise a molecular weight cut-off that excludes the virus particles from entering the ligand-activated core, and wherein a molecule smaller than the molecular weight cut-off of the pores (e.g. the protamine sulfate) can enter the ligand-activated core, allowing for a safer vaccine produced at high yields.

[0101] Thus the residual host cell DNA of the obtained virus preparation or vaccine may be less than 1 μG/mL, especially less than 900, 800, 700, 600, 500, 400, 300 or 200 ng/mL, preferably less than 150 or 100 ng/mL. In a preferred embodiment, the residual host cell DNA of the virus preparation or vaccine is less than 40 μg/mL. In some embodiments, the residual host cell protein of the virus preparation or vaccine is less than 10 μg/mL, especially less than 9, 8, 7, 6, 5, 4, 3 or 2 μg/mL, preferably less than 1 μg/mL. In a preferred embodiment, the residual host cell protein of the virus preparation or vaccine is less than 150 ng/ml. In some embodiments, the residual non-infectious virus particles of the virus preparation or vaccine is less than 10 μg/mL, especially less than 9, 8, 7, 6, 5, 4, 3 or 2 μg/mL, preferably less than 1 μg/mL. In a preferred embodiment, the content of residual non-infectious virus particles of the virus preparation or vaccine is less than 100 ng/mL.

[0102] In some embodiments, the vaccine and/or SARS-CoV-2 particles may comprise residual protamine (e.g. protamine sulfate), typically in trace amounts. In some embodiments, residual protamine (e.g. protamine sulfate) in the virus preparation or vaccine is less than 2 μg/mL or 1 μg/mL, especially less than 900, 800, 700, 600, 500, 400, 300 or 200 ng/mL, preferably less than 100 ng/mL, more preferably is below the detection limit of HPLC, in particular below the detection limit in the final drug substance. In some embodiments, the PS content is tested by HPLC or size exclusion chromatography (SEC). For example, HPLC is validated for PS determination in JEV sucrose gradient pool samples as a routine release assay and is very sensitive (i.e., limit of quantification (LOQ) 3 μg/mL: limit of detection (LOD) 1 μg/mL). In the current invention, PS content in SARS-CoV-2 drug substance was <LOD. In one embodiment, the HPLC assessment of PS content can be performed on a Superdex Peptide 10/300GL column (GE: 17-5176-01) using 30% Acetonitrile, 0.1% Trifluoroacetic acid as solvent with a flow rate of 0.6 ml/min at 25° C. and detection at 214 nm. A more sensitive method of measurement for residual protamine in a purified virus preparation is mass spectrometry (MS). In some embodiments, the residual PS levels in a Zika virus preparation are tested by MS or other such highly sensitive method, e.g. nuclear magnetic resonance (NMR). With this method, residual PS, as well as fragments and/or break-down products of PS, can be detected at trace amounts, such as levels as low as, for example, 10⁶, 10⁷ or 10⁸ molecules per typical sample load. In some embodiments, the PS levels are tested in the drug product. In some embodiments, the PS levels are tested in the drug substance.

[0103] Preferably an amount of the inactivating agent (e.g. beta-propiolactone) in the drug product or drug substance (e.g. vaccine composition) is very low. e.g. less than 100 ppm, less than 10 ppm, or less than 1 ppm (by weight).

[0104] The SARS-CoV-2 vaccine may be administered to a subject, preferably a mammalian subject, more preferably a human subject. Typically the SARS-CoV-2 vaccine is administered to a subject at risk of SARS-CoV-2 infection, e.g. in order to prevent SARS-CoV-2 infection and/or to prevent SARS-CoV-2 associated disease (COVID-19). The subject is preferably (i) an elderly subject (e.g. older than 65 years. 70 years or 80 years) (ii) a pregnant subject (iii) an immunocompromised subject or (iv) a child (e.g. a person younger than 18 years, 16 years, 14 years, 12 years. 10 years, 8 years, 6 years, 4 years, 2 years or younger). The SARS-CoV-2 vaccine described herein is advantageously capable of generating robust immune responses in subjects particularly susceptible or vulnerable to SARS-CoV-2-mobidity or mortality, i.e. immunocompromised, pregnant or elderly subjects. The SARS-CoV-2 vaccine may be administered to the subject in a single dose or two or more doses, e.g. separated by intervals of about 7, 14, 21 or 28 days.

[0105] In a preferred embodiment, on administration to a human subject the vaccine does not induce antibody-dependent enhancement (ADE) of SARS-CoV-2-associated disease (COVID-19). ADE is a phenomenon by which virus-specific antibodies (e.g. as generated by vaccination) can enhance viral entry into host cells and/or viral replication. It is an advantage of the present invention that the inactivated SARS-CoV-2 vaccine described herein shows low or no ADE in human subjects, and can therefore be safely used for mass vaccination purposes. In particular, the vaccine described herein retains high quality immunogenic epitopes, which therefore results in high neutralizing antibody titers and diminishes the risk of ADE on administration to subjects. The risk of ADE development may be assessed in non-human primates, as described in the Examples (see also Luo F, et al. (2018). Virologica Sinica 33:201-204).

[0106] In another preferred embodiment, on administration to a human subject the vaccine does not result in immunopathology. It is known that under some circumstances, a vaccine (e.g. a SARS-CoV vaccine) can result in e.g. a Th2-type immunopathology. e.g. a hypersensitivity response to SARS-CoV components in animals. In embodiments of the present invention, a Th1 type response is favored, e.g. by use of a Th1-directing adjuvant (e.g. AS01 or another adjuvant as described herein). Especially, a balanced Th2/Th1-type immune response is preferred, such as that induced by use of a Th2-stimulating adjuvant, e.g., alum, combined with a Th1-stimulating adjuvant. The risk of immunopathology developing may be assessed in animal models. e.g. as described in Tseng C. T. et al. (2012) PLoS ONE 7(4):e35421. In a preferred embodiment of the current invention, the vaccines of the invention show a shift in the Th2/Th1-type immune response to a Th1-type immune response compared to a vaccine adjuvanted with alum.

[0107] Any of the SARS-CoV-2 vaccines or compositions described herein may be administered to a subject in a therapeutically effective amount or a dose of a therapeutically effective amount. As used herein, a “therapeutically effective amount” of vaccine is any amount that results in a desired response or outcome in a subject, such as those described herein, including but not limited to prevention of infection, an immune response or an enhanced immune response to SARS-CoV-2, or prevention or reduction of symptoms associated with SARS-CoV-2 disease. More specifically, a therapeutic amount of the SARS-CoV-2 vaccine of the invention may be a total viral protein mass of between about 0.05 and 50 μg, more preferably between about 0.5 to 10 μg.

[0108] In some embodiments, the therapeutically effective amount of a SARS-CoV-2 vaccine or composition described herein is an amount sufficient to generate antigen-specific antibodies (e.g., anti-SARS-CoV-2 antibodies). In some embodiments, the therapeutically effective amount is sufficient to seroconvert a subject with at least 70% probability. In some embodiments, the therapeutically effective amount is sufficient to seroconvert a subject with at least 75%, 80%, 85%, 90%, 95%, 96%, 97%, 98%, or at least 99% probability. Whether a subject has seroconverted can be assessed by any method known in the art, such as obtaining a serum sample from the subject and performing an assay to detect anti-SARS-CoV-2 antibodies. In some embodiments, a subject is seroconverted if a serum sample from the subject contains an amount of anti-SARS-CoV-2 antibodies that surpasses a threshold or predetermined baseline. A subject is generally considered seroconverted if there is at least a 4-fold increase in anti-SARS-CoV-2 antibodies (i.e., anti-SARS-CoV-2 S protein IgG antibodies) present in a serum sample from the subject as compared to a serum sample previously taken from the same subject.

[0109] In one embodiment, the dose of the inactivated SARS-CoV-2 virus in the vaccine composition of the current invention is between about 0.01 and 25 mAU (milli-absorption units×minutes as assessed by SEC-HPLC), preferably between about 0.05 and 10 mAU, more preferably between about 0.1 and 5 mAU, most preferably between about 0.25 and 2.5 mAU. In one embodiment, the dose is between about 0.05 and 50 μg total protein as measured by (μ)BCA assay, between about 0.1 and 25 μg, between about 0.25 and 12.5 μg, preferably between about 0.5 and 5 μg total protein. More preferably the dose of the inactivated SARS-CoV-2 virus in the vaccine composition is at least 2.5 μg total protein, at least 3.5 μg total protein or at least 2.5 μg total protein, e.g. the vaccine composition comprises 2.5 μg to 25 μg, 3.5 μg to 10 μg or 4 μg to 6 μg total protein/dose, preferably about 5 μg total protein/dose. In some embodiments, the dosage is determined by the total amount of S protein in the inactivated SARS-CoV-2 formulation, as assessed by e.g. ELISA. The mass of antigen may also be estimated by assessing the SE-HPLC peak area per dose equivalent (recorded as milli-absorption units×minutes: mAU), which is estimated to be approximately 2 μg/ml total surface protein and approximately 1 μg/ml S-protein. In one embodiment, the dose is between about 0.025 and 25 μg S-protein as measured by ELISA, between about 0.05 and 12.5 μg, between about 0.125 and 6.25 μg, preferably between about 0.25 and 2.5 μg S-protein.

[0110] In a preferred embodiment, the amount of antigen in the SARS-CoV-2 vaccine is determined by ELISA. In one embodiment, the ELISA measures a SARS-CoV-2 protein or portion of a protein. e.g., nucleocapsid (N), membrane (M) or spike (S) protein; i.e., the ELISA utilizes a coating antibody specific to a SARS-CoV-2 protein or portion of a protein. In a preferred embodiment, the coating antibody is specific to the SARS-CoV-2 Spike protein S1 subunit, e.g. residues 14-685 (or 14-683) of the S-protein sequence of SEQ ID NO:3, 19, 21, 23, 25 or 27, or to the Receptor Binding Domain (RBD), e.g. residues 331 to 528 (or 319 to 541) of the S-protein sequence of SEQ ID NO:3, 19, 21, 23, 25 or 27 (see FIG. 9). In one embodiment, the ELISA readout is a mass per unit measure of the detected protein, e.g. μg/mL S-protein. In a preferred embodiment, the standard used is a spike protein trimer and the results of the SARS-CoV-2 ELISA are reported as “antigen units” (AU), corresponding to the ACE-2 binding ability of the standard protein (determined by the manufacturer).

[0111] In one embodiment, the amount of SARS-CoV-2 antigen administered to a subject is between about 1 to 100 AU/dose, preferably between about 2 to 75 AU/dose, preferably between about 3 and 60 AU/dose, more preferably between about 3 and 55 AU/dose, more preferably between about 3 and 53 AU/dose. In an even more preferred embodiment, the amount of SARS-CoV-2 antigen administered to a subject is 3 AU, 10 AU or 40 AU per dose, most preferred 40 AU per dose. In further preferred embodiments, the amount of SARS-CoV-2 antigen administered to a subject is at least 10 AU/dose, at least 20 AU/dose, at least 25 AU/dose or at least 30 AU/dose, e.g. about 10 to 60 AU/dose, 20 to 50 AU/dose, 25 to 45 AU/dose or 30 to 40 AU/dose, e.g. about 35 AU/dose. The amount of SARS-CoV-2 antigen (e.g. in AU/dose) may be assessed, for example, by a SARS-CoV-2 ELISA assay as described in Example 1. It is estimated that there are about 1 to 1.5×10⁷ viral particles per AU, and the amounts of SARS-CoV-2 antigen described above may be construed accordingly. Thus in some embodiments, the amount of SARS-CoV-2 antigen administered to a subject is between about 1.5×10⁷ to 1.5×10⁹ viral particles/dose, or between about 4.5×10⁷ to 9.0×10⁸ viral particles/dose, e.g. at least 1.5×10⁸ viral particles/dose or at least 3.0×10⁸ viral particles/dose, about 1.5×10⁸ to 7.5×10⁸ viral particles/dose or about 4.5×10⁸ to 6.0×10⁸ viral particles/dose.

[0112] In some embodiments, seroconversion of a subject is assessed by performing a plaque reduction neutralization test (PRNT). Briefly, PRNT is used to determine the serum titer required to reduce the number of SARS-CoV-2 plaques by 50% (PRNT50) as compared to a control serum/antibody. The PRNT50 may be carried out using monolayers of Vero cells or any other cell type/line that can be infected with SARS-CoV-2. Sera from subjects are diluted and incubated with live, non-inactivated SARS-CoV-2. The serum/virus mixture may be applied to Vero cells and incubated for a period of time. Plaques formed on the Vero cell monolayers are counted and compared to the number of plaques formed by the SARS-CoV-2 in the absence of scrum or a control antibody. A threshold of neutralizing antibodies of 1:10 dilution of serum in a PRNT50 is generally accepted as evidence of protection in the case of JEV (Hombach et. al. Vaccine (2005) 23:5205-5211).

[0113] In some embodiments, the SARS-CoV-2 particles may be formulated for administration in a composition, such as a pharmaceutical composition. The term “pharmaceutical composition” as used herein means a product that results from the mixing or combining of at least one active ingredient, such as an inactivated SARS-CoV-2, and one or more inactive ingredients, which may include one or more pharmaceutically acceptable excipient. A preferred pharmaceutically acceptable excipient is human serum albumin (HSA), such as, especially recombinant HSA (rHSA). In one embodiment, the SARS-CoV-2 vaccine of the invention contains about 10 to 50 μg HSA/dose, preferably about 20 to 40 μg HSA/dose, more preferably about 25 to 35 μg HSA/dose.

[0114] Pharmaceutical compositions of the invention, including vaccines, can be prepared in accordance with methods well known and routinely practiced in the art (see e.g., Remington: The Science and Practice of Pharmacy. Mack Publishing Co. 20th ed. 2000; and Ingredients of Vaccines—Fact Sheet from the Centers for Disease Control and Prevention, e.g., adjuvants and enhancers as described above to help the vaccine improve its work, preservatives and stabilizers to help the vaccine remain unchanged (e.g., . . . albumin, such as human serum albumin (HSA) or recombinant HSA (rHSA), phenols, glycine)). As used herein, the term “vaccine” refers to an immunogenic composition, e.g. a composition capable of inducing an immune response in a (human) subject against an antigen (e.g. against a SARS-CoV-2 antigen). For instance, the vaccine or composition may be capable of generating neutralizing antibodies against SARS-CoV-2. In some embodiments, the vaccine or composition is capable of generating antibodies (e g IgG) against SARS-CoV-2 S (spike) protein. In some embodiments, the vaccine or composition is capable of generating a T cell response against SARS-CoV-2 proteins or peptides, for instance a T cell response against a SARS-CoV-2 S-protein, membrane (M) protein and/or nucleocapsid (N) protein or peptides derived therefrom. Preferably the vaccine or immunogenic composition generates neutralizing antibodies and a T cell response against SARS-CoV-2. Typically the vaccine or immunogenic composition is capable of inducing a protective effect against a disease caused by the antigen, e.g. a protective effect against SARS-CoV-2 infection (e g symptomatic and/or asymptomatic infection) and/or COVID-19 disease).

[0115] Pharmaceutical compositions are preferably manufactured under GMP conditions. Typically, a therapeutically effective dose of the inactivated SARS-CoV-2 vaccine preparation is employed in the pharmaceutical composition of the invention. The inactivated SARS-CoV-2 particles are formulated into pharmaceutically acceptable dosage forms by conventional methods known to those of skill in the art. Dosage regimens are adjusted to provide the optimum desired response (e.g., the prophylactic response).

[0116] Dosages of the active ingredients in the pharmaceutical compositions of the present invention can be varied so as to obtain an amount of the active ingredient which is effective to achieve the desired pharmaceutical response for a particular subject, composition, and mode of administration, without being toxic to the subject. The selected dosage level depends upon a variety of pharmacokinetic factors, including the activity of the particular compositions of the present invention employed, the route of administration, the time of administration, the rate of excretion of the particular compound being employed, the duration of the treatment, other drugs, compounds and/or materials used in combination with the particular compositions employed, the age, sex, weight, condition, general health and prior medical history of the subject being treated, and like factors.

[0117] A physician, veterinarian or other trained practitioner, can start dosing of the inactivated SARS-CoV-2 vaccine employed in the pharmaceutical composition at levels lower than that required to achieve the desired therapeutic effect and gradually increase the dosage until the desired effect (e.g., production of anti-SARS-CoV-2 virus antibodies) is achieved. In general, effective doses of the compositions of the present invention, for the prophylactic treatment of groups of people as described herein vary depending upon many different factors, including means of administration, target site, physiological state of the patient, whether the patient is human or an animal, other medications administered, and the titer of anti-SARS-CoV-2 antibodies desired. Dosages need to be titrated to optimize safety and efficacy. In some embodiments, the dosing regimen entails subcutaneous or intramuscular administration of a dose of inactivated SARS-CoV-2 vaccine twice, once at day 0 and once at about day 7. In some embodiments, the dosing regimen entails subcutaneous administration of a dose of inactivated SARS-CoV-2 vaccine twice, once at day 0 and once at about day 14. In some embodiments, the dosing regimen entails subcutaneous administration of a dose of inactivated SARS-CoV-2 vaccine twice, once at day 0 and once at about day 28. In some embodiments, the inactivated SARS-CoV-2 vaccine is administered to the subject once. In a preferred embodiment, the SARS-CoV-2 vaccine is administered to the subject more than once, preferably two times. In a preferred embodiment, the vaccine is administered on day 0 and day 21. In another preferred embodiment, the vaccine is administered on day 0 and day 28.

[0118] In further embodiments, a first (prime) dose of the inactivated SARS-CoV-2 vaccine is administered and a second (boost) dose of the inactivated SARS-CoV-2 vaccine is administered at least 28 days, at least 60 days, at least 70 days, at least 80 days or 90 days after the first dose. Thus in some embodiments, the second dose of the inactivated SARS-CoV-2 vaccine is administered 30 to 120 days or 1 to 4 months (preferably about 3 months) after the first dose.

[0119] In other embodiments, the inactivated SARS-CoV-2 vaccine is administered as a booster dose only, e.g. a first (prime) dose of a (different) SARS-CoV-2 vaccine is administered and then a second (boost) dose of the inactivated SARS-CoV-2 vaccine is administered, e.g. at least 7, 14, 21, 28, 60 or 90 days after the first dose. The first (prime) dose of the SARS-CoV-2 vaccine may comprise any other vaccine or immunogenic composition that stimulates an immune response and/or a protective effect in subjects against SARS-CoV-2 virus. For example, the first dose of SARS-CoV-2 vaccine may comprise a recombinant viral vector or an mRNA sequence encoding one or more SARS-CoV-2 proteins and/or fragments thereof, e.g. a SARS-CoV-2 spike (S) protein. Alternatively the first dose of SARS-CoV-2 vaccine may comprise a subunit vaccine, e.g. comprising one or more SARS-CoV-2 proteins and/or fragments thereof, e.g. a SARS-CoV-2 spike (S) protein or fragment thereof.

[0120] Also within the scope of the present disclosure are kits for use in prophylactic administration to a subject, for example to prevent or reduce the severity of SARS-CoV-2 infection. Such kits can include one or more containers comprising a composition containing inactivated SARS-CoV-2, such as an inactivated SARS-CoV-2 vaccine. In some embodiments, the kit may further include one or more additional components comprising a second composition, such as a second vaccine, e.g. a second kind of SARS-CoV-2 vaccine that applies a different technology than in the first dose. In some embodiments, the second vaccine is a vaccine for an arbovirus. In some embodiments, the second vaccine is a Japanese encephalitis virus vaccine, a Zika virus vaccine, a Dengue virus vaccine and/or a Chikungunya virus vaccine.

[0121] In some embodiments, the kit can comprise instructions for use in accordance with any of the methods described herein. The included instructions can comprise a description of administration of the composition containing inactivated SARS-CoV-2 vaccine to prevent, delay the onset, or reduce the severity of SARS-CoV-2 infection. The kit may further comprise a description of selecting a subject suitable for administration based on identifying whether that subject is at risk for exposure to SARS-CoV-2 or contracting a SARS-CoV-2 infection. In still other embodiments, the instructions comprise a description of administering a composition containing inactivated SARS-CoV-2 vaccine to a subject at risk of exposure to SARS-CoV-2 or contracting SARS-CoV-2 infection.

[0122] The instructions relating to the use of the composition containing inactivated SARS-CoV-2 vaccine generally include information as to the dosage, dosing schedule, and route of administration for the intended treatment. The containers may be unit doses, bulk packages (e.g., multi-dose packages) or sub-unit doses. Instructions supplied in the kits of the invention are typically written instructions on a label or package insert (e.g., a paper sheet included in the kit), but machine-readable instructions are also acceptable.

[0123] The kits of the present disclosure are in suitable packaging. Suitable packaging includes, but is not limited to, vials, bottles, jars, flexible packaging, and the like. Also contemplated are packages for use in combination with a specific device, such as a syringe or an infusion device. The container may have a sterile access port, for example the container may be a vial having a stopper pierceable by a hypodermic injection needle. At least one active agent in the composition is an inactivated SARS-CoV-2, as described herein.

[0124] This invention is not limited in its application to the details of construction and the arrangement of components set forth in the following description or illustrated in the drawings. The invention is capable of other embodiments and of being practiced or of being carried out in various ways. Also, the phraseology and terminology used herein is for the purpose of description and should not be regarded as limiting. The use of “including”, “comprising”, or “having”, “containing”, “involving”, and variations thereof herein, is meant to encompass the items listed thereafter and equivalents thereof as well as additional items.

[0125] Unless otherwise defined herein, scientific and technical terms used in connection with the present disclosure shall have the meanings that are commonly understood by those of ordinary skill in the art. Further, unless otherwise required by context, singular terms shall include pluralities and plural terms shall include the singular. The methods and techniques of the present disclosure are generally performed according to conventional methods well-known in the art. Generally, nomenclatures used in connection with, and techniques of biochemistry, enzymology, molecular and cellular biology, microbiology, virology, cell or tissue culture, genetics and protein and nucleic chemistry described herein are those well-known and commonly used in the art. The methods and techniques of the present disclosure are generally performed according to conventional methods well known in the art and as described in various general and more specific references that are cited and discussed throughout the present specification unless otherwise indicated.

[0126] The present invention is further illustrated by the following examples, which in no way should be construed as further limiting. The entire contents of all of the references (including literature references, issued patents, published patent applications, and co-pending patent applications) cited throughout this application are hereby expressly incorporated by reference, in particular for the teaching that is referenced hereinabove. However, the citation of any reference is not intended to be an admission that the reference is prior art.

### EXAMPLES

### Example 1. Drug Substance Production

[0127] For the production of SARS-CoV-2, the JEV process platform (Srivastava et al., Vaccine 19 (2001) 4557-4565: U.S. Pat. No. 6,309,650B1) was used as a basis, also taking into account improvements in the process as adapted to Zika virus purification as disclosed in WO2017/109223A1 (which is incorporated herein in its entirety). Briefly, non-infectious SARS-CoV-2 particle aggregates, host cell proteins and other low molecular weight impurities are removed by protamine sulfate precipitation or benzonase treatment and the resulting preparation is optionally further purified by sucrose gradient centrifugation. See FIG. 1 for an outline of the production process.

[0128] The first SARS-CoV-2 isolate from Italy, identified and characterized at the National Institute for Infectious Diseases “Lazzaro Spallanzani” IRCCS, Rome, Italy (Accession No: MT066156), the RNA sequence thereof corresponding to the DNA sequence provided by SEQ ID NO: 9, was used in all Examples disclosed herein. Other novel coronavirus SARS-CoV-2 isolates may also be obtained from the following sources:
[0129] 1.—EVAg (European Virus Archive), e.g. one of the following strains: BetaCoV/France/IDF0372/2020 (Ref-SKU:014V-03890, https://www.european-virus-archive.com/virus/human-2019-ncov-0), 2019-nCoV/Italy-INMI1, (Ref-SKU:008V-03893, SEQ ID NO: 9; https://www.european-virus-archive.com/virus/human-2019-ncov-strain-2019-ncovitaly-inmil); BetaCoV/Netherlands/01, (Ref-SKU: 010V-03903, https://www.european-virus-archive.com/virus/sars-cov-2-strain-nl2020)
[0130] 2.—BEI Resources (Biodefense and Emerging Infections Research Resources): e.g. Isolate USA-WA1/2020, NIAID, NIH: SARS-Related Coronavirus 2, NR-52281 (GenBank accession MN985325)
[0131] 3.—PHE (Public Health England): https://www.gov.uk/government/collections/contacts-public-health-england-regions-local-centres-and-emergency: e.g. isolate of UK B.1.1.7 (UK_MIG457: EVAg Ref-SKU: 004V-04032; SEQ ID NO: 22) or South African B.1.531 (SA_P2: EVAg Ref-SKU: 004V-04071: SEQ ID NO: 18) lineage

[0132] Cell buildup and infection with SARS-Cov-2. The Vero cells used in the methods described herein were the VERO (WHO) cell line, obtained from the Health Protection Agency general cell collection under catalogue number 88020401, from which a master cell bank was generated. A research master seed bank (rMSB) of SARS-CoV-2 (strain used 2019-nCoV/Italy-INMI1) was prepared on Vero cells and the genomic sequence was checked by sequencing. For production of SARS-CoV-2, Vero cells were grown in Eagle's minimal essential medium (EMEM) containing 10% fetal bovine serum (FBS) and monolayers were infected with SARS-CoV-2 at a multiplicity of infection (moi) of 0.001 to 1, preferably 0.01, plaque forming units (pfu) per cell. After allowing virus adsorption, the cultures were washed 2-4 times with PBS, fed with serum-free EMEM and incubated at 35° C. with 5% CO₂ until the virus titer reaches a desired level.

[0133] SARS-CoV-2 harvest. The culture medium was harvested at days 2, 3, 5 and 7 and harvests were pooled and centrifuged in a standard centrifuge. The resulting supernatant was filtered, followed by TFF ultrafiltration to remove cell culture medium components and reduce batch volume. Host cell DNA and protein reduction as well as reduction of non-infectious virus aggregates in the concentrated material was achieved by precipitation with protamine sulfate. Protamine sulfate was added to the diafiltrated SARS-CoV-2 material to a final nominal concentration of ˜2 mg/mL, while stirring, followed by incubation at 2-8° C. for 30 minutes. Alternatively, the diafiltrated SARS-CoV-2 material was treated with benzonase.

[0134] Optional primary inactivation. The SARS-CoV-2 virus was inactivated by treatment with beta-propiolactone directly after removal of virus-containing cell culture medium from Vero cells, in order to render the virus safe to handle at BSL2. Inactivation is possible at any stage in the purification process, however, such as e.g., after centrifugation, before, during or after treatment with protamine sulfate or benzonase or before or after sucrose gradient centrifugation. Inactivation is carried out by the use of a chemical inactivation agent such as formaldehyde (formalin); enzyme; beta-propiolactone; ethanol; trifluroacetic acid; acetonitrile; bleach; urea; guanidine hydrochloride; tri-n-butyl phosphate; ethylene-imine or a derivative thereof; an organic solvent, optionally Tween. Triton, sodium deoxycholate, or sulfobetaine; or a combination thereof. It is particularly preferred that inactivation is carried out using beta-propiolactone, which preferentially targets viral RNA whilst relatively sparing viral surface proteins and their immunogenic epitopes. Inactivation may also be achieved by pH changes (very high or very low pH), by heat treatment or by irradiation such as gamma irradiation or UV irradiation, particularly UV-C irradiation. The SARS-CoV-2 virus is optionally inactivated by two separate inactivation steps, such as, e.g. beta-propiolactone treatment and UV-C irradiation.

[0135] Evaluation of BPL starting concentration for inactivation of a highly resistant model virus (PPV). A preliminary study for evaluation of PPV virus inactivation kinetics was conducted to initially support our proposed SARS-CoV-2 BPL inactivation procedure. Porcine Parvovirus (PPV) was selected as a model virus to evaluate the inactivation capability of BPL in aqueous solution because of its high resistance to physico-chemical inactivation. Three starting concentrations of BPL were evaluated: 300 ppm (1/3333). 500 ppm (1/2000) and 700 ppm (1/1429). Virus solution was spiked with BPL at these concentrations and incubated at 5±2° C. for 24 hours. Kinetic samples were taken at 0.5, 2, 6, 24 h and after the BPL hydrolyzation step and analysed for remaining infectivity. The results are shown in Table A.

TABLE A
Summary of virus titers and reduction factors
for PPV inactivation by BPL concentration [ppm]

| | 300 | 500 | 700 |
|---|---|---|---|
| titer w/o BPL | 9.97 | 10.04 | 9.98 |
| [TCID50/mL] | | | |
| titer | 6.66 | 4.98 | 4.1 |
| 24 h incubation | | | |
| [TCID50/mL] | | | |
| titer after | 5.1 | 2.6** | <LOD.* |
| hydrolysis [TCID50/mL] | | | |
| reduction factor | 4.84 ± 0.39 | 7.43 ± 0.92 | ≥6.89 ± 0.23 |
| after hydrolysis | | | |

*below limit of detection
**Note limit of detection for 500 ppm BPL is lower than for 700 ppm BPL

[0136] A clear effect of initial BPL concentration on the inactivation effectivity was observed with a reduction between 3.3 and 5.9 log 10 after 24 h incubation at 5±2° C. (before hydrolysis). The following hydrolysis step further reduced the titers by on average addition 1.7 log 10 while the hold control titers remained constant throughout the whole procedure. This indicated that for highly resistant virus contaminations the hydrolysis step might serve as an additional inactivation step. With overall reduction factors of 4.84 (300 ppm), 7.43 (500 ppm) and below the limit of detection (700 ppm) the applied BPL treatment was considered effective for the inactivation of Parvoviridae at concentrations >300 ppm. Therefore, we decided to select 500 ppm for SARS-CoV-2 virus inactivation in all further studies.

### SARS-CoV-2 Virus Inactivation by BPL

[0137] Based on existing data on the inactivation of model viruses by BPL (see section above on PPV inactivation) a BPL concentration of 500 ppm (1/2000) was selected for the inactivation of SARS-CoV-2 virus harvest material. As the stability of BPL in solutions is highly temperature dependent an incubation temperature of 5±3° C. and an incubation time of 24 hours were selected to ensure enough BPL present throughout the whole inactivation. After addition and mixing of BPL to the concentrated harvest, the inactivation solution is transferred to a fresh container where the inactivation takes place under controlled conditions. This transfer excludes the possibility of virus particles in potential dead-spots during initial mixing not being in contact with BPL.

[0138] To stabilize the pH of the inactivated viral solution during hydrolysis of the BPL, protamine sulfate (PS) treated concentrated harvest pre-cooled to 5±3° C. is supplemented with 25 mM HEPES pH 7.4. To reduce remaining BPL after the inactivation the solution is warmed to temperatures above 32° C. for a total time of 2.5 hours±0.5 hours in a temperature-controlled incubator set to 37±2° C. The total time of the hydrolyzation step for the current process volume of about 1 L was between 5 hours 15 minutes and 6 hours 15 minutes including the warming to and the incubation above 32° C.

[0139] After completion of the hydrolysis, the inactivated viral solution (IVS) was immediately cooled down to 5±3° C. in a temperature-controlled fridge and stored there until inactivation was confirmed by large volume plaque assay and serial passaging assay which currently requires 18 days in total. Recovery of virus particles throughout the inactivation process was monitored by size-exclusion chromatography.

[0140] Initial studies at lab-scale from 15 mL up to 1000 mL indicated a very fast inactivation kinetic for SARS-CoV-2 where virus titers of up to 8 log 10 pfu/mL were reduced below detectable levels within 2 hours after BPL addition. These results were confirmed for GMP production runs at a final inactivation volume of approximately 1 L. Taken together with the inactivation data for model viruses the applied BPL treatment can be considered efficient and includes a significant safety margin for inactivation of SARS-CoV-2 concentrated harvest material.

[0141] In a further preferred embodiment, the inactivation step(s) are particularly gentle, in order to preserve surface antigen integrity, especially integrity of the S protein. In one embodiment, the gentle inactivation method comprises contacting a liquid composition comprising SARS-CoV-2 particles with a chemical viral inactivating agent (such as e.g. any of the chemical inactivation agents as listed above or a combination thereof, preferably beta-propiolactone) in a container, mixing the chemical viral inactivating agent and the liquid composition comprising SARS-CoV-2 particles under conditions of laminar flow but not turbulent flow, and incubating the chemical viral inactivating agent and the liquid composition comprising SARS-CoV-2 particles for a time sufficient to inactivate the viruses. The gentle inactivation step is optionally performed in a flexible bioreactor bag. The gentle inactivation step preferably comprises five or less container inversions during the period of inactivation. Preferably, the mixing of the chemical viral inactivating agent and the composition comprising SARS-CoV-2 particles comprises subjecting the container to rocking, rotation, orbital shaking, or oscillation for not more than 10 minutes at not more than 10 rpm during the period of incubation.

[0142] Purification of SARS-CoV-2. Optionally, the material was immediately further processed by batch adsorption (also known herein as batch chromatography) with Capto™ Core 700 or CC400 chromatography media at a final concentration of ˜1% CC700 or CC400. The material was incubated at 4° C. for 15 minutes under constant agitation using a magnetic stirrer. After incubation, if used, the CC700 or CC400 solid matter was allowed to settle by gravity for 10 minutes and the SARS-CoV-2 material is removed from the top of the solution in order to avoid blockage of the filter by CaptoCore particles. Any remaining CaptoCore particles and DNA precipitate were then removed from the solution by filtration using a 0.2 μm Mini Kleenpak EKV filter capsule (Pall). The pooled filtered harvest material was adjusted to a final concentration of 25 mM Tris pH 7.5 and 10% sucrose (w/w) using stock solutions of both components. This allowed for freezing the concentrated harvest at <−65° C. if required.

[0143] The resulting filtrate is further processed by sucrose density gradient centrifugation (also known herein as batch centrifugation) for final concentration and polishing of the SARS-CoV-2 material. The concentrated protamine sulfate (PS) or benzonase, preferred is PS, treated harvest was loaded on top of a solution consisting of three layers of sucrose with different densities. The volumes of individual layers for a centrifugation in 100 mL bottle scale are shown in Table 1a.

TABLE 1a
Volumes for sucrose density centrifugation.

| Sucrose solution (w/w) | Volume (mL) |
|---|---|
| PS-treated SARS-CoV-2 harvest | 40 |
| (10% sucrose) | |
| 15% sucrose | 15 |
| 35% sucrose | 15 |
| 50% sucrose | 20 |
| Total volume | 90 |

[0144] The sucrose gradient bottles were prepared by stratifying the individual sucrose layers by pumping the solutions into the bottom of the bottles, starting with the SARS-Cov-2 material with the lowest sucrose density (10% sucrose (w/w)), followed by the other sucrose solutions in ascending order. The described setup is shown in FIG. 3. The prepared SG bottles were transferred into a rotor pre-cooled to 4° C. and centrifuged at ˜11,000 RCF max at 4° C. for at least 20 hours, without brake/deceleration.

[0145] After centrifugation, harvest of serial 2 mL fractions of the sucrose gradient is performed from the bottom up with a peristaltic pump. The fractions were immediately tested by SDS-PAGE/silver staining to identify virus-containing fractions with sufficiently high purity. Thus, identified fractions were pooled and further processed. The purified SARS-CoV-2 was stored at <−65° C. or immediately formulated.

[0146] Formulation of SARS-CoV-2 with adjuvant. The SARS-CoV-2 particles were formulated with alum. Optionally, a Th1 adjuvant was also added to the formulation or provided as a separate composition for bedside mixing.

[0147] SARS-CoV-2 ELISA Assay. Inactivated SARS-CoV-2 antigen content (i.e. content of S1 as the major antigenic protein) in preparations described herein was determined (quantified) by ELISA. The SARS-CoV-2 ELISA used herein is a four-layer immuno-enzymatic assay with a SARS-CoV-2 spike antibody (AM001414; coating antibody) immobilized on a microtiter plate to which the SARS-CoV-2 sample is added. On binding of the antigen to the coating antibody, the plate was further treated with primary antibody (i.e. AbFlex® SARS-COV-2 spike antibody (rAb) (AM002414)). This was followed by addition of the secondary antibody, which is an enzyme linked conjugate antibody (i.e. Goat anti-Mouse IgG HRP Conjugate). The plates were washed between various steps using a mild detergent solution (PBS-T) to remove any unbound proteins or antibodies. The plate was developed by addition of a tetramethyl benzidine (TMB) substrate. The hydrolyzed TMB forms a stable colored conjugate that is directly proportional to the concentration of antigen content in the sample. The antigen quantification was carried out by spectrophotometric detection at λ450 nm (λ630 nm reference) using the standard curve generated in an automated plate reader as a reference. Standards were prepared starting with a 20 antigen units (AU)/mL spike trimer working solution neat, which was further serially diluted 1:2 for the following standard concentrations: 20 AU/mL, 10 AU/mL, 5 AU/mL, 2.5 AU/mL, 1.25 AU/mL, 0.625 AU/mL, 0.3125 AU/mL and 0.1263 AU/mL. Each dilution was tested in duplicate per plate. An “antigen unit” of the spike trimer standard, according to the supplier (R&D Systems), corresponds to its binding ability in a functional ELISA with Recombinant Human ACE-2 His-tag.

### Reference Standards and Antibodies:

[0148] Coating Antibody: SARS-CoV-2 Spike Antibody (AM001414)
[0149] Spike Trimer (S1+S2), His-tag (SARS-CoV-2) (e.g. BPS Lot #200826; Cat #100728)
[0150] SARS-CoV-2 QC (e.g. RSQC240920AGR)
[0151] Primary Detection Antibody AbFlex® SARS-CoV-2 Spike Antibody (rAb) (AM002414)
[0152] Secondary Detection Antibody Goat anti-Mouse IgG HRP Conjugate
[0153] Coating buffer: Carbonate buffer
[0154] ELISA wash buffer: PBS+0.05% Tween-20 (PBS-T).
[0155] Sample dilution buffer: PBS-T+1% BSA.

[0156] The production process delivered high density and intact spike proteins (see FIG. 6). Estimated were about 1 to 1.5×10⁷ viral particles per AU. Inactivation process by beta propiolactone provided for a fast inactivation kinetic and no detectable chemical modification of the S-protein. Key parameters and relevant process related impurities were similar to the commercial IXIARO® production process (see Table 1b). SARS-CoV-2 drug substance according to the invention was highly pure (>95%) according to SDS-PAGE (silver stain, reduced) and free from aggregates (monomer virus (>95%) according to SE-HPLC (see FIG. 7).

[0157] Further confirmatory studies aimed at characterizing modifications of S-protein following beta-propiolactone-inactivated SARS-CoV-2 are carried out by mass spectrometric analysis of tryptic digests of the S-protein. The modification of amino acids in important epitopes is minimal. Initial alignment of receptor binding domains (RBD) within the S protein and hACE2 interfaces and epitopes of several known (cross)-neutralizing antibodies (SARS-CoV and SARS-CoV-2) have shown no amino acids within these epitopes with potential high conversion and only few with potential lower conversion rates.

TABLE 1b
Comparison of key parameters and relevant process
related impurities of the SARS-CoV-2 drug substance
and IXIARO ® drug substance.

| | SARS-CoV-2 | IXIARO |
|---|---|---|
| Viral yield at harvest (log₁₀ PFU/mL) | >7.8 | >7.3 |
| Residual host cell protein (HCP) | <150 | <100 |
| (ng/mL) | | |
| Residual host cell DNA (hcDNA) | <LOQ | <LOQ |
| (pg/mL) | | |
| (LOQ 40 pg/mL) | | |
| Virus Monomer by SEC-MALLS (%) | >95 | >95 |
| Residual Protamine sulfate* (μg/mL) | <LOQ | <LOQ |
| (LOQ 2 μg/mL) | | |
| Endotoxins (EU/mL) | <0.05 | <0.05 |
| Residual Inactivation reagent | <LOQ | <LOQ |
| | (LOQ 1 ppm, | (LOQ 50 ppm, |
| | β-Propiolactone) | Formalin) |

### Example 2. In Vitro and In Vivo Assessment of Immunogenicity and Protective Capacity of Inactivated SARS-CoV-2 Vrrus Compositions

[0158] Immunogenicity. Prior to immunization, experimental groups of 10 Balb/c mice were bled and pre-immune sera are prepared. The mice were administered a dose titration of inactivated SARS-CoV-2 formulated with alum subcutaneously (see Table 2). At two different intervals after immunization (see below), blood was collected and immune sera prepared, spleens were collected at the final bleed. All animal experiments were carried out in accordance with Austrian law (BGB1 Nr. 501/1989) and approved by “Magistratsabteilung 58”. Sera were assessed for total IgG and subclasses (IgG1/IgG2a) by ELISA and neutralizing antibodies by PRNT. Th1/Th2 responses were further assessed by IFN-γ ELISpot and intracellular cytokine staining (CD4⁺/CD8⁺).
[0159] Schedule 1: Immunizations Day 0/Day 7, interim bleed Day 14, final bleed and spleen harvest Day 28
[0160] Schedule 2: Immunizations Day 0/Day 21, interim bleeds Day 14/Day 28, final bleed and spleen harvest Day 35

TABLE 2
Design of dosing experiments, 10 mice/group: 3 dosage groups:
0.2-2 μg total protein; number of experiments: 3. For experimentation
purposes, the Th1 adjuvant is added directly to the SARS-CoV-
2/alum formulation before immunization of the mice.

| | | Adjuvants (mice/group) | | | |
|---|---|---|---|---|---|
| | | | | | Aluminium |
| | | | | | hydroxide |
| | | | | | (50 μg) + |
| Inactivated | | | Aluminium | Th1 | Th1 |
| SARS-CoV- | | w/o | hydroxide | adjuvant | adjuvant |
| 2 dosages | | adjuvant | (50 μg) | (tbd) | (tbd) |
| 2 | μg | 10 | 10 | 10 | 10 |
| 0.8 | μg | 10 | 10 | 10 | 10 |
| 0.2 | μg | 10 | 10 | 10 | 10 |

| | | | | | |
|---|---|---|---|---|---|
| Placebo | 10 | 10 | 10 | 10 | |
| | 40 | 40 | 40 | 40 | 160 |

[0161] Plaque reduction neutralization test (PRNT). Each well of a twelve-well tissue culture plate was seeded with Vero cells and incubated 35° C. with 5% CO₂ for three days. Serial dilutions from pools of heat-inactivated sera from each treatment group are tested. Each serum preparation was incubated with approximately 50-80 pfu of SARS-CoV-2 at 35° C. with 5% CO₂ for 1 hour. The cell culture medium was aspirated from the Vero cells and the SARS-CoV-2/serum mixtures were added to each well. The plates are gently rocked and then incubated for 2 hours at 35° C. with 5% CO₂. To each well, 1 mL of a 2% methylcellulose solution containing EMEM and nutrients are added, and the plates were further incubated for 4 days at 35° C. with 5% CO₂. The cells were then stained for 1 hour with crystal violet/5% formaldehyde and washed 3 times with deionized water. The plates were air dried and the numbers of plaques in each well manually counted. Alternatively, other methods, such as e.g. TCID₅₀ may be applied.

TABLE 3
Design of schedule and longevity experiments, 10 mice/group;
Immunization schedule as for Table 2, but in addition;
interim bleeds 2, 6, 10, 14, 18 and 22 weeks after second
immunization; end- bleed 26 weeks after second immunization;
only with the preferred dose; only subcutaneous route;
number of experiments: 1. For experimentation purposes,
the Th1 adjuvant was added directly to the SARS-CoV-2/alum
formulation before immunization of the mice.

| | Adjuvants (mice/group) | | | |
|---|---|---|---|---|
| | | | Alum + | |
| | | | Th1 | |
| Route | w/o adjuvant | Alum | adjuvant | |
| Vaccine s.c | 20 | 20 | 20 | |
| Placebo, s.c. | 20 | 20 | 20 | |
| □ | 40 | 40 | 40 | 120 |

[0162] Protective capacity. The protective capacity of inactivated SARS-CoV-2 is assessed using a SARS-susceptible transgenic mouse expressing a humanized ACE2 protein (Jackson Laboratory) (Tseng, C.-T. K. et al., Severe Acute Respiratory Syndrome Coronavirus Infection of Mice Transgenic for the Human Angiotensin-Converting Enzyme 2 Virus Receptor (2007) J of Virol 81:1162-1173) or a NHP model developed for SARS-CoV-2 infection. Groups of animals are immunized subcutaneously (s.c.) with different dosages of inactivated SARS-CoV-2 with or without adjuvant or PBS as a negative control. Three weeks after the last dose, animals are challenged with SARS-CoV-2 and monitored for disease progression and survival. In addition, serum samples are taken in order to determine the neutralizing antibody titers induced by vaccination in a PRNT assay.

TABLE 3A
Design of dosing experiment 4743 using
SARS-CoV-2 ELISA-determined dosages.

| | |
|---|---|
| Material | SGP rVSB |
| Buffer | PBS |
| AU/mouse | 3.0 |
| | 1.2 |
| | 0.3 |
| Al³⁻/mouse | 17 μg |
| Immunization | D 0/D 21 |
| Bleeds | D 28/D 35 |

[0163] Experiment 4743 Protocol. Female Balb/c mice (10 mice/group) were immunized two times s.c. (100 μL) on days 0 and 21 with doses and adjuvants as outlined in Table 3A. The readouts from the experiment were total IgG and subclasses (IgG1/IgG2a) and virus neutralization (PRNT). Vaccine formulation used in experiment 4743: purified inactivated SARS-CoV-2 produced from a research virus seed bank (rVSB) formulated in PBS with 17 μg Al³⁺ (alum)/dose.

[0164] Antibody response to SARS-CoV-2 proteins. The immune responses in mice for the different doses and adjuvant formulations were assessed with a total IgG ELISA (FIG. 4). Plates were coated with either the S1 part (FIG. 4A) or receptor binding domain (RBD) (FIG. 4B) of the spike glycoprotein or the nucleoprotein (FIG. 4C). Sera taken on days 28 and 35 were analyzed Plates were coated with 2 μg/mL antigen (S1, RBD and N protein) and mouse sera were tested at a starting dilution of 1:50 in 4-fold dilutions. For detection a secondary monoclonal antibody (HRP-conjugated goat anti-mouse IgG) was used and developed with ABTS and read at absorbance 405 nm. Wells were washed with PBS-T between each step. Endpoint titers were determined with a cut-off set to 3-fold the blank.

[0165] IgG subclass immune response. Plates were coated with the S1 part (FIG. 4A) of spike glycoprotein and sera taken on day 35 were analyzed. Subclass specific secondary antibodies (IgG1 and IgG2a) conjugated with HRP were used for detection. As standard curves (4-parameter regression) for determination of the amount of the different IgG subclasses (IgG1 and IgG2a), monoclonal antibodies with different subclasses were used (IgG1 mAb clone 43 and IgG2a mAb clone CR3022). Bound HRP-conjugated secondary mAbs were developed with ABTS and read at absorbance 405 nm. Wells were washed with PBS-T between each step. The relative IgG subclass concentration is shown in FIG. 5A and the ratio of IgG2a/IgG1 in FIG. 5B.

[0166] Observations from Experiment 4743. Inactivated SARS-CoV-2 formulated with alum induced antibodies in mice against SARS-CoV-2 detected by ELISA measuring antibodies to S1 protein, receptor binding domain (RBD) and nucleocapsid protein (N) (FIG. 4A-C). An increase in immunogenicity was observed between bleeds on day 28 and day 35. In groups receiving the lowest dose (0.3 AU), a smaller increase not significantly above the placebo was seen for S1 and RBD ELISA titers.

[0167] The alum-adjuvanted inactivated SARS-CoV-2, as expected, promoted an immune response shifted more towards a Th2 (IgG1) compared with a Th1 (IgG2a) response as demonstrated by quantification of IgG subclasses by S1 ELISA. The total amounts of IgG2a and IgG1 measured and the ratio of IgG2a:IgG1 in the treatment groups are shown in FIGS. 5A and 5B, respectively. A shift in the immune response toward Th1 (IgG2a) would likewise be expected by addition of a Th1-stimulating adjuvant to the SARS-CoV-2 vaccine composition.

[0168] Further immunization experiments are carried out in mice using GMP material with low doses (3, 1.2 and 0.3 AU) as a bridge between research and GMP material, as well as analyses of GMP material in mice with human doses (40, 10 and 3 AU).

[0169] Additionally, a challenge study is carried out in immunized non-human primates (NHP) (see FIG. 8) and a passive transfer study is carried out in hamsters using sera from human subjects vaccinated with the SARS-CoV-2 vaccine candidate of the invention (see Table 1c).

TABLE 1c
Passive transfor study of the SARS-CoV-2 vaccine candidate of the invention in hamsters.

Study objective: Proof of concept that the SARS-CoV-2 vaccine candidate of the invention induces
neutralizing antibodies providing protection against SARS-CoV-2 challenge in an animal model
Study design: Syrian hamsters receive sera from vaccinated subjects of the SARS-CoV-2 vaccine
candidate of the invention Phase 1/2 study (see Example 4 below).
Hamsters are then challenged intranasally with SARS-CoV-2, Victoria/1/2020
A 10 day follow up includes:
Clinical observations and body weights recorded daily
Viral shedding/viral loads determined via RT-qPCR
Circulating antibodies prior to challenge (neutralization)
Tissues (lung and upper respiratory tract) taken at necropsy for determination of viral
load and for histology

### Example 3. Testing of SARS-CoV-2 Vaccine for Antibody-Dependent Enhancement (ADE) of Disease and Immunopathology

[0170] Although the mechanism is poorly understood, antibodies produced in response to a previous coronavirus infection or vaccination can increase the risk for 1) immunopathology and/or 2) antibody-dependent enhancement of disease (ADE) during subsequent coronavirus infection(s). As such, any stimulation of antibodies to SARS-CoV-2 presents a hypothetical risk. In this regard, several approaches are undertaken to ensure safety of the current vaccine.

[0171] In vitro antibody-dependent enhancement assays. Immune scra from inactivated SARS-CoV-2-vaccinated mice are assessed for hallmarks of enhanced disease in vitro. Such assays are described by e.g. Wang, S.-F., et al. 2014 (Antibody-dependent SARS coronavirus infection is mediated by antibodies against spike proteins (2014) BBRC 451:208-214). Briefly, susceptible cell types or cell lines are incubated with immune sera and subsequently infected with SARS-CoV-2. Cells are assessed for cytopathic effect and/or production of inflammatory markers.

[0172] Mouse model of immunopathology. The risk of vaccine-enhanced immunopathology on challenge is assessed in a Balb/c mouse model as described by Tseng C. T. et al. (Immunization with SARS Coronavirus Vaccines Leads to Pulmonary Immunopathology on Challenge with the SARS Virus (2012) PLoS ONE 7(4):e35421). Briefly, the mice are immunized twice at two-week intervals with inactivated SARS-Cov-2 formulated as described herein followed by challenge with SARS-CoV-2. SARS-CoV-2 titers and immune cell infiltration of the lung are tested.

[0173] Non-human primate model of ADE. The risk of ADE development in non-human primates is assessed as described by Luo F, et al. (Evaluation of Antibody-Dependent Enhancement of SARS-CoV Infection in Rhesus Macaques Immunized with an Inactivated SARS-CoV Vaccine (2018) Virologica Sinica 33:201-204). Briefly. NHPs are immunized with inactivated SARS-CoV-2, followed by SARS-CoV-2 challenge and evaluation of symptoms and disease pathology.

### Example 4. Clinical Phase 1 Study

[0174] Formulation of inactivated SARS-CoV-2 for Phase 1 trial. The objective of the Phase 1 trial is to assess the safety of the vaccine, along with immunogenicity, and to determine an optimal dose and adjuvant(s) As such, three antigen doses are tested in clinical phase 1: High. Medium and Low, which are chosen to have a distance between each dose of approximately 3-fold and a span covering about a 10-fold difference between the high and low doses. The dose range is selected in part to indicate any potential dose-sparing effect of a Th1 adjuvant.

[0175] The SARS-CoV-2 virus as purified herein has a high purity of >90% as assessed by SDS-PAGE. SE-HPLC and/or SARS-CoV-2 ELISA (data not shown). Furthermore, preliminary studies have indicated that the incidence of genetic heterogeneities during passage of the virus is low and no particular individual mutations stand out (data not shown).

[0176] The SARS-CoV-2 virus as purified herein has a high purity of >90% as assessed by SDS-PAGE, SE-HPLC and/or SARS-CoV-2 ELISA (see, e.g., FIG. 7). Furthermore, preliminary studies have indicated that the incidence of genetic heterogeneities during passage of the virus is low and no particular individual mutations stand out (data not shown).

[0177] To arrive at a dose range, the SARS-CoV-2 virus was compared with JEV, specifically assessing SE-HPLC peak area per dose equivalent (recorded as milli-absorption units×minutes; mAU), the total amount of inactivated viral particles per dose and the total viral surface equivalent per dose (see Table 4). This assessment was based on the assumption of a similar surface antigen density between S (spike; SARS-CoV-2) and E (envelope; JEV) proteins. Total protein was determined by μBCA assay (Table 4). Although the assay was variable, a correspondence of 1 mAU to ˜2 μg total protein per mL was observed. Another determination using an optimized SARS-CoV-2 S-protein ELISA, as outlined in Example 1, was also performed.

TABLE 4
Comparison of JEV and SARS-CoV-2 quantification
parameters and total protein in Low, Medium
and High SARS-CoV-2 dosage groups.

| | | Ratio total | Ratio surface | Estimated total |
|---|---|---|---|---|
| | SE-HPLC peak | particle | antigen | SARS-CoV-2 |
| | area equivalent | equivalent | equivalent | protein/dose in |
| Dose | CoV/JEV | CoV/JEV | CoV/JEV | μg (μBCA assay) |
| Low | 0.25 | 0.015 | 0.070 | 0.5 |
| Medium | 1 | 0.058 | 0.288 | 2 |
| High | 2.5 | 0.145 | 0.719 | 5 |

[0178] As SARS-CoV-2 virus particles (˜92 nm diameter) are much larger than Flavivirus particles (˜40 nm), corresponding to an approximately 5-fold greater virus surface area per particle, an equivalently higher antigen content is expected. Furthermore, other inactivated virus vaccine preparations, including JEV (IXIARO), TBE (Encepur) and HepA (VAQTA) reported antigen doses in the low μg to ng protein range. As these viruses are all formalin inactivated, the BPL-inactivated SARS-CoV-2 virus of the current invention has better preserved surface antigen proteins, i.e., a better quality antigen, and requires a lower total protein dose.

[0179] For entry into the clinic a further antigen determination assay (SARS-CoV-2 ELISA assay as described in Example 1) was developed and the doses of the vaccine formulations for entry into Phase 1 trials were determined using this assay. The Phase 1 treatment groups are set forth in Table 5.

Formulation of SARS-CoV-2 Vaccine for Phase 1 Trial (0.5 mL/Dose):

### Antigen (Inactivated SARS-CoV-2) Target Doses:

[0180] Low: 3 AU/0.5 mL (6 AU/mL)*
[0181] Medium: 10 AU/0.5 mL (20 AU/mL)
[0182] High: 40 AU/0.5 mL (80 AU/mL)
[0183] *doses determined by the SARS-CoV-2 ELISA assay as described in Example 1
[0184] Aluminium hydroxide (Al³⁺): 0.5 mg/dose (1 mg/mL)
[0185] Th1 adjuvant
[0186] Recombinant Human Serum Albumin (rHSA): ˜25 μg/dose (˜50 μg/mL)
[0187] Buffer: Phosphate buffered saline (PBS)

[0188] In some cases, vaccinated subjects are challenged with an infectious dose of live SARS-CoV-2 virus (Asian and/or European lineage).

TABLE 5
Treatment groups for Phase 1 testing of inactivated SARS-Cov-2 vaccine
(low, medium and high doses are those provided in Table 4).

| | | Aluminiam | |
|---|---|---|---|
| Group | Antigen | hydroxide | Th1 adjuvant |
| 1 | Low | − | − |
| 2 | Med | − | − |
| 3 | High | − | − |
| 7 | Low | + | + |
| 8 | Med | + | + |
| 9 | High | + | + |

### Example 5. Testing of Sera of Vaccinated Organism with a Neutralization Assay

[0189] Sera of vaccinated mice, hamsters, non-human primates or humans can be tested in neutralization assays such as e.g. described in “Szurgot, L., Hanke, L., Sheward, D. J. et al. DNA-launched RNA replicon vaccines induce potent anti-SARS-CoV-2 immune responses in mice. Sci Rep 11, 3125 (2021). https://doi.org/10.1038/841598-021-82498-5”.

[0190] The read-out of the test gives an indication how well sera of vaccinated subjects can neutralize new variants and thus guides in the design of the vaccine.

### Example 6. Liquid Chromatography with Tandem Mass Spectrometry (LC-MS-MS) Analysis of Inactivated SARS-CoV-2

### Methodology:

[0191] Two samples were separated using SDS-polyacrylamide gel electrophoresis and the bands were visualized by silver staining. The bands were cut and subjected to in-gel digestion with trypsin and the resulting peptides analysed with nano-liquid chromatography coupled to a high-resolution accurate mass spectrometer. Peptides were identified from raw spectra using the MaxQuant software package and the UniProt reference databases for SARS-CoV-2 and Chlorocebus sabaeus. To account for modifications the data were re-searched specifically for β-propiolactone modifications, and the obtained results were confirmed with a second independent search algorithm (Sequest in Proteome Discoverer suite). Additionally, data were searched with the FragPipe package to account for further unknown MS-detectable modifications.

### Results:

### Protein Identification:

[0192] The bands could be clearly attributed to the three main viral proteins (Spike-protein, Membrane-protein, Nucleoprotein) as well as to background proteins from the host system (see FIG. 10). Traces of SARS-CoV-2 ORF9b and the replicase polyprotein could also be detected, but these proteins were probably not well resolved on the gel due to their size. The separation pattern on the gel was very similar for both samples with the exception of a host protein band (band 2.3), a slightly different S-protein pattern (bands 2.10-2.13), and an expected strong band of serum albumin in one of the samples (sample 2). Additionally, a number of typical lab contaminants of human origin (e.g. keratins) were detected in the background of both samples. The processing of the Spike-protein (from full length to S1, S2, and S2′) is difficult to resolve with the applied methodology but is most likely represented by the pattern in bands 9-13 in both samples.

### Modification Analysis:

[0193] Based on a publication by Uittenbogaard et al. (Reactions of β-Propiolactone with Nucleobase Analogues, Nucleosides, and Peptides, Protein Structure and Folding| Volume 286, ISSUE 42, P36198-36214, Oct. 21, 2011), it was expected to find β-propiolactone (BPL) modifications on cysteine, methionine, and histidine. Uittenbogaard et al. studied amino acids which are subject to modification by beta-propiolactone, along with the type of modification, e.g., acylation, alkylation. They have shown that BPL can react with up to 9 different amino acids (C,H,M,D,E,Y,K,E,S) depending on actual pH. In their studies higher conversions within the relevant pH range 7 to 9 were observed for Cysteine (>95%), Histidine (15-25%) and Methionine (36%) residues. The conversion rates for Aspartic Acid, Glutamic acid and Tyrosine were much lower in the range of approximately 3-15%. It was shown that disulfide groups in Cystine residues do not react.

[0194] In BPL-inactivated SARS-CoV-2 particles, BPL modifications could be detected (mainly in the form of +72 Da) but at a low abundance. Out of 2894 (sample 1) and 3086 (sample 2) identified spectra for SARS-CoV-2 proteins only 73 and 110, respectively, carried a BPL modification, which translates to 2.5 to 3.6% (see Table 6). This was also confirmed by the open modification search using FragPipe, which attributed a similarly low fraction of spectra to mass differences matching the BPL-modification.

TABLE 6
Number of identified SARS-CoV-2 peptide spectra

| Sample | Total spectra | BPL spectra | % modified |
|---|---|---|---|
| Sample 1 | 2894 | 73 | 2.5% |
| Sample 2 | 3086 | 110 | 3.6% |

[0195] Spectra of all BPL-modified peptides reported for SARS-CoV-2 proteins were inspected manually of which 6 to 8 sites were confirmed for sample 1 and 2, respectively (see Table 6) For all of these validated sites also the unmodified peptides were identified suggesting that the modification with BPL never reached 100%. We estimated the degree of modification on a particular site (the so-called site occupancy) as the ratio of modified to unmodified peptide for the same modification site normalized to the protein abundance for each band. We then selected the maximum occupancy for each site as a conservative measure of the degree of site modification. As shown in Table 7 the occupancy was in general rather low for the sites identified, in agreement with the total number of identified spectra. The only exception, M234 of the nucleoprotein, has to be interpreted carefully, as that particular peptide sequence has problematic features which likely make the estimation for this particular peptide less accurate and reliable as compared to the other sites.

TABLE 7
BPL-modified sites identified and their occupancy

| Protein | Site Position | % occupancy sample 1 | % occupancy sample 2 |
|---|---|---|---|
| Spike-protein | H207 | <0.1% | 16% |
| Spike-protein | H245 | 1% | 3% |
| Spike-protein | C379 | <0.1% | n.d. |
| Spike-protein | M1029 | <0.1% | <0.1% |
| Spike-Protein | C1032 | <0.1% | n.d. |
| Membrane protein | H154 | <0.1% | <0.1% |
| Membrane protein | H155 | 1% | 1% |
| Membrane protein | C159 | n.d. | <0.1% |
| Membrane protein | H210 | 5% | 6% |
| Nucleoprotein | M234 | <0.1% | 88%* |

n.q. = not quantified;
n.d. = not detected
*quantification uncertain, due to missed cleavages and oxidation

[0196] Apart from the expected modifications the FragPipe search revealed two other modifications (most likely acetaldehyde and acetylation) to occur in around 10% of the spectra. These modifications represent most likely artifacts introduced during gel staining and sample preparation, as they also occur on contaminant proteins.

### SUMMARY

[0197] Based on the results described above it is concluded that the main components in these samples corresponds to SARS-CoV2 proteins. The BPL modifications were detectable but appeared to be low, i.e. around 3% on whole SARS-CoV-2 proteome level (i.e. all SARS-CoV-2 proteins identified). Only 5 amino acids of the S-protein were found to be modified and this was also only detected for a minority of the analysed S-protein (e.g. around 16% for the Spike-protein at the H207 amino acids, i.e. the probability to have a modification at H207 was around 16%). The two samples differ only slightly with respect to some background proteins and in their degree of modification, with sample 1 showing slightly lower levels of BPL-modification. Please note that only about 30 to 40% of the amino acids of the Spike protein could be tested.

### Conclusion

[0198] This data supports the view that the mild inactivation approach of the invention minimizes the modifications within the S-protein and thus the native surface of the S-protein is largely preserved. In comparison, determination of modifications by BPL inactivation of flu samples were more frequent, i.e. 83 sites on HA and 43 sites on NA for one sample flu vaccine (NIBRG-121xp) and 99 sites on HA and 39 sites on NA for another sample (NYMC-X181A) were modified, wherein HA and NA are the two major membrane glycoproteins, i.e. the primary immunogens for flu (She Yi-Min et al., Surface modifications of influenza proteins upon virus inactivation by beta-propiolactone; Proteomics 2013, 13, 3537-3547. DOI 10.1002/pmic.201300096). Thus BPL inactivation of influenza virus can lead to numerous protein modifications including some affecting membrane fusion.

### Example 7. Further Liquid Chromatography with Tandem Mass Spectrometry (LC-MSMS) Analysis of Inactivated SARS-CoV-2

### Methodology:

[0199] A further LC-MSMS analysis of BPL-inactivated SARS-CoV-2 particles, as described in Example 6, was performed in order to obtain greater coverage of the proteins. Five aliquots of the BPL-inactivated SARS-CoV-2 sample were separated on SDS-PAGE and the bands visualized by either silver staining for visualization or Coomassie staining for processing. The Coomassie-stained bands corresponding to spike protein (based on previous analysis) were subjected to in-gel digestion with trypsin or chymotrypsin or to acid hydrolysis. Trypsin digests were performed twice, once with and once without previous PNGase F (peptide: N-glycosidase F) digestion, to identify peptides masked by glycosylation.

[0200] Digested peptides were analysed by LC-MSMS essentially as described in Example 6. In particular, the resulting peptides were analyzed with nano-liquid chromatography coupled to a high-resolution accurate mass spectrometer Peptides were identified from raw spectra using the MaxQuant software package and the UniProt reference databases for SARS-CoV-2 and Chlorocebus sabaeus in combination with a database of common lab contaminants. To account for modifications the data were also searched specifically for β-propiolactone (BPL) modifications, and spectra of all BPL-modified peptides of the SARS-CoV-2 spike protein were manually validated. The degree of modification was globally estimated as the percentage of BPL-modified spectra identified, and on site-level by calculating site occupancies from the ratio of modified to unmodified peptides for each peptide/site separately.

### Results:

[0201] The total coverage of particular SARS-CoV-2 proteins, using the combination of four digestion methods (i.e. (i) trypsin (ii) trypsin+PNGase F (iii) chymotrypsin and (iv) acid hydrolysis) was as follows:
[0202] Spike (S) protein—91.5%
[0203] Membrane (M) protein—60.36%
[0204] Nucleoprotcin (N)—74.70%

[0205] The number of BPL-modified peptides in the inactivated SARS-CoV-2 particles, based on each digestion method, is shown in Table 8 below:

TABLE 8
Number of identified SARS-CoV-2 peptide
spectra across all bands analyzed

| | | BPL | % BPL |
|---|---|---|---|
| Sample | Total | modified | modified |
| Trypsin | 3148 | 97 | 3.1% |
| Trypsin + PNGase | 2354 | 61 | 2.6% |
| F | | | |
| Chymotrypsin | 2753 | 174 | 6.3% |
| Acid hydrolysis | 939 | 33 | 3.5% |
| Total | 9194 | 365 | 4.0% |

[0206] As shown in Example 6, this confirms that the percentage of BPL-modified peptides is low regardless of the digestion method, e.g. less than 7%, 2 to 7% or around 2-5% on average.

[0207] Using a combination of the four digestion methods described above, a greater coverage of amino acid residues in SARS-CoV-2 proteins could be achieved. Accordingly, BPL-modifications were detected at the positions in the spike (S) and membrane (M) proteins shown in Table 9 below. The mean percentage occupancy at each site, as described in Example 6 above, is also shown in Table 9.

TABLE 9
BPL-modified sites identified in S protein and their occupancy

| Protein | Site Position | % occupancy |
|---|---|---|
| Spike-protein | H49 | 1% |
| Spike-protein | H146 | 2% |
| Spike-protein | C166 | 1% |
| Spike-protein | M177 | 6% |
| Spike-Protein | H207 | 1% |
| Spike-protein | H245 | 13% |
| Spike-protein | C432 | 8% |
| Spike-protein | H519 | 2% |
| Spike-protein | H625 | 7% |
| Spike-Protein | M1029 | 2% |
| Spike-Protein | H1058 | 11% |
| Spike-protein | H1083 | 3% |
| Spike-protein | H1088 | 4% |
| Spike-protein | H1101 | 1% |
| Spike-protein | H1159 | 4% |
| Spike-Protein | H1271 | 1% |
| Membrane protein | H125 | <10% |
| Membrane protein | H154 | <10% |
| Membrane protein | H155 | <10% |
| Membrane protein | H210 | <10% |

[0208] From the data in Table 9, it can be seen that up to around 16 residues to the spike (S) protein may be modified, and up to A residues in the membrane (M) protein. The occupancy at each site is low, e.g. less than 20%, typically less than HPs, Therefore the inactivated SARS-CoV-2 particles show a low degree of BPL-modifications.

### Additional Aspects of the Invention

[0209] In further aspects, the present invention provides:

[0210] A1. A SARS-CoV-2 vaccine comprising an optimally (e.g. wherein the native surface of the S-protein is preserved) inactivated SARS-CoV-2 particle, wherein the SARS-CoV-2 particle is able to seroconvert a subject that is administered the SARS-CoV-2 vaccine with at least a 70% probability.

[0211] A2. The SARS-CoV-2 vaccine of aspect A1, wherein the SARS-CoV-2 particle is able to seroconvert the subject that is administered the SARS-CoV-2 vaccine with at least a 80%, 85%, 90%, or 95% probability.

[0212] A3. The vaccine of aspect A1 or A2, wherein the SARS-CoV-2 particle has a RNA genome corresponding to the DNA sequence provided by any one of the nucleic acid sequences of
[0213] SEQ ID NO: 1 (see Genbank NC_045512 2), or a variant nucleic acid sequence that is at least 85% identical to SEQ ID NO: 1 and able to pack a virulent SARS-CoV-2; of
[0214] SEQ ID NO: 9 (see NCBI MT066156), or a variant nucleic acid sequence that is at least 85% identical to SEQ ID NO: 1 and able to pack a virulent SARS-CoV-2; or
[0215] SEQ ID NO: 18 (see NCBI MW598408), or a variant nucleic acid sequence that is at least 85% identical to SEQ ID NO: 18 and able to pack a virulent SARS-CoV-2; or
[0216] SEQ ID NO: 20 (see NCBI MW320923), or a variant nucleic acid sequence that is at least 85% identical to SEQ ID NO. 20 and able to pack a virulent SARS-CoV-2; or
[0217] SEQ ID NO: 22 (see NCBI MW422256), or a variant nucleic acid sequence that is at least 85% identical to SEQ ID NO: 22 and able to pack a virulent SARS-CoV-2; or
[0218] SEQ ID NO: 24 (see NCBI MW493681), or a variant nucleic acid sequence that is at least 85% identical to SEQ ID NO 24 and able to pack a virulent SARS-CoV-2; or
[0219] SEQ ID NO: 26 (see NCBI MW306426), or a variant nucleic acid sequence that is at least 85% identical to SEQ ID NO: 26 and able to pack a virulent SARS-CoV-2.

[0220] A4. The vaccine of any one of aspects A1-A3, wherein the SARS-CoV-2 particle has an S protein as defined by the amino acid sequence
[0221] SEQ ID NO: 3, or a variant amino acid sequence that is at least 95% identical to SEQ ID NO: 3 and able to pack a virulent SARS-CoV-2; or
[0222] SEQ ID NO: 11, or a variant amino acid sequence that is at least 95% identical to SEQ ID NO: 13 and able to pack a virulent SARS-CoV-2; or
[0223] SEQ ID NO: 19, or a variant amino acid sequence that is at least 95% identical to SEQ ID NO: 19 and able to pack a virulent SARS-CoV-2; or
[0224] SEQ ID NO: 21, or a variant amino acid sequence that is at least 95% identical to SEQ ID NO: 21 and able to pack a virulent SARS-CoV-2; or
[0225] SEQ ID NO: 23, or a variant amino acid sequence that is at least 95% identical to SEQ ID NO: 23 and able to pack a virulent SARS-CoV-2; or
[0226] SEQ ID NO: 25, or a variant amino acid sequence that is at least 95% identical to SEQ ID NO: 25 and able to pack a virulent SARS-CoV-2; or
[0227] SEQ ID NO: 27, or a variant amino acid sequence that is at least 95% identical to SEQ ID NO: 27 and able to pack a virulent SARS-CoV-2.

[0228] A4.1 The vaccine of any one of aspects A1-A4, comprising a second SARS-CoV-2 particle that is different to the first SARS-CoV-2 particle and is selected from the group consisting of SEQ ID NO: 1, 9, 18, 20, 22, 24 and 26.

[0229] A5. The vaccine of any one of aspects A1-A4 and A4.1, wherein the SARS-CoV-2 is inactivated by chemical inactivation, thermal inactivation, pH inactivation, or UV inactivation or radiation inactivation.

[0230] A6. The vaccine of aspect A5, wherein the chemical inactivation comprises contacting the SARS-CoV-2 particles with a chemical inactivation agent for longer than is required to completely inactivate the SARS-CoV-2 as measured by plaque assay or as measured by plaque assay phis one day.

[0231] A7. The vaccine of aspect A6, wherein the chemical inactivation comprises contacting the SARS-CoV-2 particle with formaldehyde and/or beta-propiolactone, preferably beta-propiolactone.

[0232] A8. The vaccine of aspect A7, wherein the formaldehyde and/or beta-propiolactone inactivation comprises contacting the SARS-CoV-2 particle with formaldehyde and/or beta-propiolactone for between 2-10 days.

[0233] A9. The vaccine of any one of aspects A5-A8, wherein the chemical activation is performed at about 4° C. or about 22° C.

[0234] A10. The vaccine of any one of aspects A1-A9, further comprising an adjuvant.

[0235] A11. The vaccine of aspect A10, wherein the adjuvant is an aluminium salt adjuvant, optionally in combination with AS01, AS03, MF59, imiquimod and/or CpG 1018.

[0236] A12. The vaccine of aspect A11, wherein the aluminium salt adjuvant is aluminium hydroxide or aluminium phosphate salt.

[0237] A13. The vaccine of any one of A10-A12, wherein the vaccine comprises or further comprises an adjuvant comprising a peptide and a deoxyinosine-containing immunostimulatory oligodeoxynucleic acid molecule (I-ODN).

[0238] A14. The vaccine of aspect A13, wherein the peptide comprises the sequence KLKL₅KLK (SEQ ID NO: 5) and the I-ODN comprises oligo-d(IC)₁₃ (SEQ ID NO: 6).

[0239] A15. The vaccine of any one of aspects A1-A14, further comprising one or more pharmaceutically acceptable excipient.

[0240] B1. A kit comprising a SARS-CoV-2 vaccine of any one of aspects A1-A15.

[0241] B2. The kit of aspect B1, further comprising a second vaccine.

[0242] B3. The kit of aspect B2, wherein the second vaccine is another SARS-CoV-2 virus vaccine (e.g. of another technology such as mRNA or adenovirus vectored), an influenza virus vaccine or a Chikungunya virus vaccine.

[0243] C1. A method, comprising administering a first dose of a therapeutically effective amount of the SARS-CoV-2 vaccine of any one of aspects A1-A15 to a subject in need thereof.

[0244] C2. The method of aspect C1, further comprising administering a second dose of a therapeutically effective amount of the SARS-CoV-2 vaccine.

[0245] C3. The method of aspect C1 or C2, wherein the second dose of the SARS-CoV-2 vaccine is administered about 7 days after the first dose of the SARS-CoV-2 vaccine.

[0246] C4. The method of aspect C1 or C2, wherein the second dose of the SARS-CoV-2 vaccine is administered about 14 days after the first dose of the SARS-CoV-2 vaccine.

[0247] C5. The method of aspect C1 or C2, wherein the second dose of the SARS-CoV-2 vaccine is administered about 21 days after the first dose of the SARS-CoV-2 vaccine.

[0248] C6. The method of aspect C1 or C2, wherein the second dose of the SARS-CoV-2 vaccine is administered about 28 days after the first dose of the SARS-CoV-2 vaccine.

[0249] C7. The method of any one of aspects C1-C5, wherein the administering results in production of SARS-CoV-2 neutralizing antibodies.

[0250] D1. A method of producing a SARS-CoV-2 vaccine, comprising
[0251] (i) passaging a SARS-CoV-2 on Vero cells, thereby producing a culture medium comprising the SARS-CoV-2;
[0252] (ii) harvesting the culture medium of (i);
[0253] (iii) precipitating the harvested culture medium of (ii), thereby producing a SARS-CoV-2 supernatant; and
[0254] (iv) optimally inactivating the SARS-CoV-2 in the SARS-CoV-2 supernatant of (iii) thereby producing an inactivated SARS-CoV-2.

[0255] D2. The method of aspect D1, further comprising concentrating the culture medium of (ii) prior to step (iii).

[0256] D3. The method of aspect D1 or D2, wherein the precipitation of (iii) comprises contacting the culture medium of (ii) with protamine sulfate or benzonase.

[0257] D4. The method of any one of aspects D1-D3, further comprising (v) dialyzing the inactivated SARS-CoV-2 of (iv), thereby producing a dialyzed SARS-CoV-2.

[0258] D5. The method of aspect D4, further comprising a step (vi), comprising filtering the dialyzed SARS-CoV-2 of (v).

[0259] D6. The method of any one of aspects D1-D5, wherein the inactivating is by chemical inactivation, thermal inactivation, pH inactivation, or UV inactivation.

[0260] D7. The method of aspect D6, wherein the chemical inactivation comprises contacting the SARS-CoV-2 particle with a chemical inactivation agent for at least 4 days.

[0261] D8. The method of aspect D6 or D7, wherein the chemical inactivation agent comprises formaldehyde.

[0262] D9. The method of any one of aspects D6-D8, wherein the chemical activation is performed at about 4° C. or about 22° C.

[0263] D10. The method of aspect D8 or D9, farther comprising neutralizing the formaldehyde.

[0264] D11. The method of aspect D10, wherein the neutralizing is performed with sodium metabisulfite.

[0265] D12. The method of any one of aspects D1-D11, wherein the chemical inactivation is performed with BPL, preferably at a concentration of 300 to 700 ppm, more preferably 500 ppm and inactivated for about 1 to 48 h. preferably 20 to 28 h, most preferred 24 hours±2 hours (such as also ±1 hour or ±0.5 hour) at 2° C. to 8° C.

[0266] D13. The method of aspect D12, wherein the chemical inactivation is followed by a hydrolization step for 2.5 hours±0.5 hours at 35° C. to 39° C., preferably around 37° C.

[0267] E1. The use of the optimally inactivated SARS-CoV-2 vaccine of any one of aspects A1-A15 for the treatment and/or prevention of a SARS-CoV-2 infection.

[0268] E2. The use of aspect E1, wherein the inactivated SARS-CoV-2 vaccine is administered in a first dose of a therapeutically effective amount to a subject in need thereof.

[0269] B3. The use of aspect E2, wherein the inactivated SARS-CoV-2 vaccine is administered in a second dose of a therapeutically effective amount to the subject.

[0270] E4. The use of aspect E3, wherein the second dose of the inactivated SARS-CoV-2 vaccine is administered about 7 days after the first dose of the SARS-CoV-2 vaccine.

[0271] E5. The use of aspect E3, wherein the second dose of the SARS-CoV-2 vaccine is administered about 14 days after the first dose of the SARS-CoV-2 vaccine.

[0272] E6. The use of aspect E3, wherein the second dose of the SARS-CoV-2 vaccine is administered about 21 days after the first dose of the SARS-CoV-2 vaccine.

[0273] E7. The use of aspect E3, wherein the second dose of the SARS-CoV-2 vaccine is administered about 28 days after the first dose of the SARS-CoV-2 vaccine.

[0274] E8. The use of any one of aspects E1-E6, wherein the administering results in production of SARS-CoV-2 neutralizing antibodies.

[0275] F1. A pharmaceutical composition for use in the treatment and prevention of a SARS-CoV-2 infection, wherein said pharmaceutical composition comprises the optimally inactivated SARS-CoV-2 vaccine of any one of aspects A1-A15.

[0276] F2. The pharmaceutical composition of aspect F1, wherein the inactivated SARS-CoV-2 vaccine is administered in a first dose of a therapeutically effective amount to a subject in need thereof.

[0277] F3. The use of aspect F2, wherein the inactivated SARS-CoV-2 vaccine is administered in a second dose of a therapeutically effective amount to the subject.

[0278] F4. The use of aspect F3, wherein the second dose of the inactivated SARS-CoV-2 vaccine is administered about 7 days after the first dose of the SARS-CoV-2 vaccine.

[0279] F5. The use of aspect F3, wherein the second dose of the SARS-CoV-2 vaccine is administered about 14 days after the first dose of the SARS-CoV-2 vaccine.

[0280] F6. The use of aspect F3, wherein the second dose of the SARS-CoV-2 vaccine is administered about 21 days after the first dose of the SARS-CoV-2 vaccine.

[0281] F7. The use of aspect F3, wherein the second dose of the SARS-CoV-2 vaccine is administered about 28 days after the first dose of the SARS-CoV-2 vaccine.

[0282] F8. The use of any one of aspects F1-F6, wherein the administering results in production of SARS-CoV-2 neutralizing antibodies.

[0283] G1. A SARS-CoV-2 vaccine comprising an effective amount of antigen, wherein said effective amount is able to seroconvert a subject that is administered the SARS-CoV-2 vaccine with at least a 70% probability.

[0284] G2. The SARS-CoV-2 vaccine according to aspect G1, wherein said effective amount is able to seroconvert a subject that is administered the SARS-CoV-2 vaccine with at least 80%, 85%, 90%, or 95% probability.

[0285] G3. The SARS-CoV-2 vaccine according to aspect Gil or 02, wherein said effective amount is between about 1 to 100 AU/dose, preferably between about 2 to 75 AU/dose, preferably between about 3 and 60 AU/dose, more preferably between about 3 and 55 AU/dose, more preferably between about 3 and 53 AU/dose.

[0286] G4. The SARS-CoV-2 vaccine according to aspect G3, where said effective amount is determined by ELISA wherein the antigen units (AU) correspond to ACE-2 binding capacity of the spike protein used as a standard.

[0287] H1. A SARS-CoV-2 vaccine comprising an inactivated SARS-CoV-2 particle; wherein a native surface conformation of the SARS-CoV-2 particle is preserved in the vaccine, such that the vaccine is capable of generating neutralizing antibodies against native SARS-CoV-2 particles in a human subject.

[0288] H2. A SARS-CoV-2 vaccine according to aspect H1, wherein viral RNA in the inactivated SARS-CoV-2 particle is replication-deficient.

[0289] H3. A SARS-CoV-2 vaccine according to aspect H1 or H2, wherein viral RNA in the inactivated SARS-CoV-2 particle (i) is alkylated and/or acylated (ii) comprises one or more modified purine (preferably guanine) residues or strand breaks and/or (iii) is cross-linked with one or more viral proteins.

[0290] H4. A SARS-CoV-2 vaccine according to any preceding aspect, wherein the inactivated SARS-CoV-2 particle is a beta-propiolactone-inactivated SARS-CoV-2 particle, preferably at a concentration of 300 to 700 ppm, more preferably 500 ppm and inactivated for about 1 to 48 h. preferably 20 to 28 h, most preferred 24 hours±2 hours (such as also ±1 hour or ±0.5 hour) at 2° C. to 8° C., followed optionally by a hydrolyzation for 2.5 hours±0.5 hours at 35° C. to 39° C., preferably around 37° C.

[0291] H5. A SARS-CoV-2 vaccine according to any preceding aspect, wherein the inactivated SARS-CoV-2 particle is an ultraviolet (UV)-inactivated SARS-CoV-2 particle.

[0292] H6. A SARS-CoV-2 vaccine according to any preceding aspect, wherein surface proteins in the inactivated SARS-CoV-2 particle comprise reduced modifications compared to viral RNA in the inactivated SARS-CoV-2 particle, preferably wherein surface proteins comprise a reduced proportion of modified residues compared to viral RNA in the inactivated SARS-CoV-2 particle; said modifications being with respect to a native SARS-CoV-2 particles, preferably wherein said modifications comprise alkylated and/or acylated nucleotide or amino acid residues.

[0293] H7. A SARS-CoV-2 vaccine according to any preceding aspect, wherein the inactivated SARS-CoV-2 particle comprises a native conformation of (i) spike (S) protein; (ii) nucleocapsid (N) protein; (iii) membrane (M) glycoprotein; and/or (iv) envelope (E) protein; preferably wherein the inactivated SARS-CoV-2 particle comprises a native conformation spike (S) protein.

[0294] H8. A SARS-CoV-2 vaccine according to any preceding aspect, wherein infectivity of mammalian cells by the inactivated SARS-CoV-2 particle is reduced by at least 99%, 99.99% or 99.9999% compared a native SARS-CoV-2 particle, or wherein infectivity of mammalian cells by the inactivated A SARS-CoV-2 particle is undetectable.

[0295] H9. A SARS-CoV-2 vaccine according to any preceding aspect, further comprising one or more pharmaceutically acceptable excipients, such as e.g., human serum albumin (HSA).

[0296] H10. A SARS-CoV-2 vaccine according to any preceding aspect, further comprising an adjuvant.

[0297] H11. A SARS-CoV-2 vaccine according to aspect H10, wherein the adjuvant comprises aluminium hydroxide or aluminium phosphate.

[0298] H12. A SARS-CoV-2 vaccine according to aspect H11, wherein aluminium hydroxide or aluminium phosphate is the only adjuvant in the vaccine.

[0299] H13. A SARS-CoV-2 vaccine according to aspect H10 or 11, wherein the adjuvant comprises or further comprises a Th1 response-directing adjuvant.

[0300] H14. A SARS-CoV-2 vaccine according to aspect H13, wherein the Th1 response-directing adjuvant comprises 3-O-desacyl-4′-monophosphoryl lipid A (MPL), saponin QS-21, a CpG-containing oligodeoxynucleotide (CpG ODN), squalene. DL-α-tocopherol, a cationic peptide, a deoxyinosine-containing immunostimulatory oligodeoxynucleic acid molecule (I-ODN) and/or imiquimod.

[0301] H15. A SARS-CoV-2 vaccine according to aspect H10, wherein the adjuvant comprises
[0302] (i) a liposomal preparation comprising 3-O-desacyl-4′-monophosphoryl lipid A (MPL) and saponin QS-21, preferably Adjuvant System 01;
[0303] (ii) a CpG ODN comprising the sequence 5′ TGACTGTGAACGTTCGAGATGA 3′ (SEQ ID NO:4), preferably CpG 1018.
[0304] (iii) squalene, DL-α-tocopherol and polysorbate 80 (preferably Adjuvant System 03);
[0305] (iv) an oil-in-water emulsion comprising squalene. Tween 80 and Span 85, preferably ME59;
[0306] (v) a peptide of sequence KLKL₅KLK (SEQ ID NO: 5) and oligo-d(IC)₁₃ (SEQ ID NO: 6), preferably IC31; or
[0307] (vi) an aluminium salt and optionally a Th1-directing adjuvant.

[0308] H16. The SARS-CoV-2 vaccine according to any preceding aspect, wherein the vaccine is able to seroconvert a subject that is administered the SARS-CoV-2 vaccine with at least a 70% probability.

[0309] H17. The SARS-CoV-2 vaccine according to aspect H16, wherein the SARS-CoV-2 vaccine is able to seroconvert the subject that is administered the SARS-CoV-2 vaccine with at least an 80%, 85%. 90%, or 95% probability.

[0310] H18. The SARS-CoV-2 vaccine according to any one of the preceding aspects, wherein the SARS-CoV-2 particle comprises an RNA sequence (and/or fragments thereof, optionally comprising modified (preferably alkylated or acylated) nucleotide residues) corresponding to a DNA sequence (i) as defined by SEQ ID NO: 9; or (ii) having at least 80%, at least 85%, at least 90%, at least 95% or at least 99% sequence identity to SEQ ID NO: 9; preferably wherein a native (con-inactivated) SARS-CoV-2 particle comprising the RNA sequence is able to pack a virulent SARS-CoV-2.

[0311] H19. The SARS-CoV-2 vaccine according to any one of the preceding aspects, wherein the said vaccine comprises an additional SARS-CoV-2 particle that comprises an RNA sequence (and/or fragments thereof, optionally comprising modified (preferably alkylated or acylated) nucleotide residues) corresponding to a DNA sequence (i) as defined by SEQ ID NO: 18; or (ii) having at least 80%, at least 85%, at least 90%, at least 95% or at least 99% sequence identity to SEQ ID NO: 18; preferably wherein a native (non-inactivated) SARS-CoV-2 particle comprising the RNA sequence is able to pack a virulent SARS-CoV-2.

[0312] H20. The SARS-CoV-2 vaccine according to any one of the preceding aspects, wherein the said vaccine comprises an additional SARS-CoV-2 particle that comprises an RNA sequence (and/or fragments thereof, optionally comprising modified (preferably alkylated or acylated) nucleotide residues) corresponding to a DNA sequence (i) as defined by SEQ ID NO: 22; or (ii) having at least 80%, at least 85%, at least 90%, at least 95% or at least 99% sequence identity to SEQ ID NO: 22; preferably wherein a native (non-inactivated) SARS-CoV-2 particle comprising the RNA sequence is able to pack a virulent SARS-CoV-2.

[0313] H21. The SARS-CoV-2 vaccine according to any preceding aspect, wherein the vaccine is obtained or obtainable from Vero cells.

[0314] H22. The SARS-CoV-2 vaccine according to any preceding aspect, wherein, upon administration to a human subject, the vaccine (i) does not induce antibody-dependent enhancement (ADE) of SARS-CoV-2-associated disease (COVID-19), and/or (ii) does not induce immunopathology in the subject.

[0315] H23. A method of preventing or treating SARS-CoV-2 infection and/or SARS-CoV-2-associated disease (COVID-19) in a human subject in need thereof, comprising administering a prophylactically or therapeutically effective amount of the SARS-CoV-2 vaccine of any preceding aspect to the subject.

[0316] H24. The method according to aspect H23, further comprising administering a second dose of a prophylactically or therapeutically effective amount of the SARS-CoV-2 vaccine, preferably wherein the second dose of the vaccine is the same formulation as the first.

[0317] H25. The method according to aspect H23 or H24, wherein said prophylactically or therapeutically effective amount of the SARS-CoV-2 vaccine per dose is defined as about 1 to 100 AU/dose, preferably between about 2 to 75 AU/dose, preferably between about 3 and 60 AU/dose, more preferably between about 3 and 55 AU/dose, more preferably between about 3 and 53 AU/dose, as assessed by ELISA, even more preferably between about 3 and 40 AU/dose such as e.g. 40 AU/dose.

[0318] H26. The method according to aspect H23 or 24, wherein said prophylactically or therapeutically effective amount per dose of the SARS-CoV-2 vaccine is defined as about 0.05 to 50 μg total protein, about 0.1 to 25 μg, about 0.25 to 12.5 μg, preferably about 0.5 to 5 μg total protein, as measured by (μ)BCA.

[0319] H27. The method according to aspect H23 or H24, wherein said prophylactically or therapeutically effective amount per dose of the SARS-CoV-2 vaccine is defined as about 0.025 to 25 μg S-protein, about 0.05 to 12.5 μg, about 0.125 to 6.25 μg, preferably about 0.25 to 2.5 μg S-protein, as measured by ELISA.

[0320] H28. The method according to aspect H24, wherein the second dose of the SARS-CoV-2 vaccine is administered about 7 days, about 14 days, about 21 days, or about 28 days after a first dose of the SARS-CoV-2 vaccine, preferably wherein the second dose of the vaccine is the same formulation as the first.

[0321] H29. The method according to any one of aspects H22 to H28, wherein the administering results in production of SARS-CoV-2 neutralizing antibodies.

[0322] H30. A method of producing a SARS-CoV-2 vaccine, comprising:
[0323] (a) producing native SARS-CoV-2 particles;
[0324] (b) inactivating the native SARS-CoV-2 particles to obtain inactivated SARS-CoV-2 particles;
[0325] (c) incorporating the inactivated SARS-CoV-2 particles in a vaccine composition;
[0326] wherein a native surface conformation of the SARS-CoV-2 particle is preserved in the inactivation step, such that the vaccine is capable of generating neutralizing antibodies against native SARS-CoV-2 particles in a human subject.

[0327] H31. The method according to aspect H30, wherein the vaccine composition comprises aluminium hydroxide.

[0328] H32. The method according to aspect H31, wherein the SARS-CoV-2 vaccine comprising aluminium hydroxide contains less than 1.25 ppb Cu.

[0329] H33. The method according to aspect H32, wherein the inactivation step preferentially targets viral RNA in the SARS-CoV-2 particle.

[0330] H34. The method according to aspect H30 or H33, wherein the inactivation step comprises (i) alkylating and/or acylating viral RNA (ii) modifying purine (preferably guanine) residues or introducing strand breaks into viral RNA and/or (iii) cross-linking viral RNA with one or more viral proteins.

[0331] H35. The method according to any one of aspects H30. H33 or H34, wherein the inactivation step comprises treating the native SARS-CoV-2 particles with beta-propiolactone.

[0332] H36. The method according to aspect H35, wherein a concentration of beta-propiolactone in the inactivation step is 0.01 to 1% by weight, preferably 0.05 to 0.5% by weight, more preferably about 0.1% by weight.

[0333] H37. The method according to aspect H35 or H36, wherein the native SARS-CoV-2 particles are contacted with beta-propiolactone for at least 5 hours, at least 10 hours, at least 24 hour or at least 4 days.

[0334] H38. The method according to any of aspects H30 or H33 to H37, wherein the inactivation step is performed at about 0° C. to about 25° C., preferably about 4° C. or about 22° C.

[0335] H39. The method according to any of aspects H30 or H33 to H38, wherein the inactivation step comprises treating the native SARS-CoV-2 particles with ultraviolet (UV) light.

[0336] H40. The method according to any one of aspects H30 or H33 to H39, wherein step (a) comprises one or more of the following steps;
[0337] (i) passaging a SARS-CoV-2 on Vero cells, thereby producing a culture medium comprising the SARS-CoV-2;
[0338] (ii) harvesting the culture medium of (i);
[0339] (iii) precipitating the harvested culture medium of (ii), thereby producing native SARS-CoV-2 particles in a supernatant.

[0340] H41. The method according to aspect H40, further comprising concentrating the culture medium of (ii) prior to step (iii).

[0341] H42. The method according to aspect H40 or H41, wherein the precipitating of (iii) comprises contacting the culture medium of (ti) with protamine sulfate or benzonase.

[0342] H43. The method according to any one of aspects H30 or H33 to H42, further comprising dialyzing the inactivated SARS-CoV-2 particles, thereby producing a dialyzed SARS-CoV-2.

[0343] H44. The method according to aspect H43, further comprising filtering the dialyzed SARS-CoV-2.

[0344] H45. The method according to any one of aspects H30 or H33 to H44, wherein the inactivation step comprises contacting a liquid composition comprising native SARS-CoV-2 particles with a chemical viral inactivating agent in a container, mixing the chemical viral inactivating agent and the liquid composition comprising SARS-CoV-2 particles under conditions of laminar flow but not turbulent flow, and incubating the chemical viral inactivating agent and the liquid composition comprising SARS-CoV-2 particles for a time sufficient to inactivate the viral particles.

[0345] H46. The method according to aspect H45, wherein the inactivation step is performed in a flexible bioreactor bag.

[0346] H47. The method according to aspect H45 or H46, wherein the inactivation step comprises five or less container inversions during the period of inactivation.

[0347] H48. The method according to any one of aspects H45 to H47, wherein the mixing of the chemical viral inactivating agent and the composition comprising native SARS-CoV-2 particles comprises subjecting the container to rocking, rotation, orbital shaking, or oscillation for not more than 10 minutes at not more than 10 rpm during the period of incubation.

[0348] H49. The method according to any one of aspects H30 or H33 to H48, further comprising purifying the inactivated SARS-CoV-2 particles by one or more methods selected from (i) batch chromatography and/or (ii) sucrose density gradient centrifugation.

[0349] H50. The method according to any one of aspects H30 or H33 to H49, wherein step (c) comprises combining the inactivated SARS-CoV-2 particles with an adjuvant.

[0350] H51. The method according to aspect H50, wherein the adjuvant comprises a Th1 response-directing adjuvant.

[0351] H52. The method according to aspect H50 or H51, wherein the adjuvant comprises 3-O-desacyl-4′-monophosphoryl lipid A (MPL), saponin QS-21, a CpG-containing oligodeoxynucleotide (CpG ODN), squalene. DL-α-tocopherol and/or imiquimod.

[0352] H53. A SARS-CoV-2 vaccine obtained or obtainable by the method of any one of aspects H30 or H33 to H52.

[0353] H54. Use of a SARS-CoV-2 vaccine of any one of aspects H1 to H22 or H53 for the treatment or prevention of a SARS-CoV-2 infection in a subject.

[0354] H55. A pharmaceutical composition for use in the prevention or treatment of a SARS-CoV-2 infection in a subject, wherein said pharmaceutical composition is the inactivated SARS-CoV-2 vaccine as defined in any one of aspects H1 to H22 or H53, optionally in combination with one or more pharmaceutically acceptable excipients and/or adjuvants.

[0355] H56. The SARS-CoV-2 vaccine as defined in any one of aspects H1 to H22 or H53 for use as a medicament.

[0356] H57. A vaccine, method, use or pharmaceutical composition according to any preceding aspect, wherein the subject is (i) an elderly subject, preferably a subject over 65, over 70 or over 80 years of age; (ii) an immunocompromised subject; or (iii) a pregnant subject.

[0357] H58. A vaccine, method, use or pharmaceutical composition according to any preceding aspect, for use in prevention or treatment of a SARS-CoV-2 infection without induction of (i) antibody-dependent enhancement (ADE) of SARS-CoV-2-associated disease (COVID-19); and/or (ii) immunopathology in the subject.

[0358] The present application claims priority from EP20168324.0 (6 Apr. 2020), EP 20202118.4 (15 Oct. 2020), EP 20211853.5 (4 Dec. 2020) EP21154647.8 (1 Feb. 2021), PCT/US2021/20313 (1 Mar. 2021) and EP 21160913.6 (5 Mar. 2021), the contents of which are incorporated herein by reference. All publications mentioned in the above specification are herein incorporated by reference. Various modifications and variations of the described embodiments of the present invention will be apparent to those skilled in the art without departing from the scope and spirit of the present invention. Although the present invention has been described in connection with specific preferred embodiments, it should be understood that the invention as claimed should not be unduly limited to such specific embodiments. Indeed, various modifications of the described modes for carrying out the invention which are obvious to those skilled in the art are intended to be within the scope of the following claims.

SEQUENCES

SEQ ID NO: 1
Severe acute respiratory syndrome coronavirus 2 (SARS-CoV-2) isolate Wuhan-Hu-1, complete genome
(GenBank: MN908947; Wu, F., et al. A new coronavirus associated with human respiratory disease in
China (2020) Nature 579: 265-269)
ATTAAAGGTTTATACCTTCCCAGGTAACAAACCAACCAACTTTCGATCTCTTGTAGATCTGTTCTCTAAACGAACTTTAAAA
TCTGTGTGGCTGTCACTCGGCTGCATGCTTAGTGCACTCACGCAGTATAATTAATAACTAATTACTGTCGTTGACAGGACA
CGAGTAACTCGTCTATCTTCTGCAGGCTGCTTACGGTTTCGTCCGTGTTGCAGCCGATCATCAGCACATCTAGGTTTCGTCC
GGGTGTGACCGAAAGGTAAGATGGAGAGCCTTGTCCCTGGTTTCAACGAGAAAACACACGTCCAACTCAGTTTGCCTGTT
TTACAGGTTCGCGACGTGCTCGTACGTGGCTTTGGAGACTCCGTGGAGGAGGTCTTATCAGAGGCACGTCAACATCTTAA
AGATGGCACTTGTGGCTTAGTAGAAGTTGAAAAAGGCGTTTTGCCTCAACTTGAACAGCCCTATGTGTTCATCAAACGTTC
GGATGCTCGAACTGCACCTCATGGTCATGTTATGGTTGAGCTGGTAGCAGAACTCGAAGGCATTCAGTACGGTCGTAGTG
GTGAGACACTTGGTGTCCTTGTCCCTCATGTGGGCGAAATACCAGTGGCTTACCGCAAGGTTCTTCTTCGTAAGAACGGTA
ATAAAGGAGCTGGTGGCCATAGTTACGGCGCCGATCTAAAGTCATTTGACTTAGGCGACGAGCTTGGCACTGATCCTTAT
GAAGATTTTCAAGAAAACTGGAACACTAAACATAGCAGTGGTGTTACCCGTGAACTCATGCGTGAGCTTAACGGAGGGG
CATACACTCGCTATGTCGATAACAACTTCTGTGGCCCTGATGGCTACCCTCTTGAGTGCATTAAAGACCTTCTAGCACGTGC
TGGTAAAGCTTCATGCACTTTGTCCGAACAACTGGACTTTATTGACACTAAGAGGGGTGTATACTGCTGCCGTGAACATGA
GCATGAAATTGCTTGGTACACGGAACGTTCTGAAAAGAGCTATGAATTGCAGACACCTTTTGAAATTAAATTGGCAAAGA
AATTTGACACCTTCAATGGGGAATGTCCAAATTTTGTATTTCCCTTAAATTCCATAATCAAGACTATTCAACCAAGGGTTGA
AAAGAAAAAGCTTGATGGCTTTATGGGTAGAATTCGATCTGTCTATCCAGTTGCGTCACCAAATGAATGCAACCAAATGT
GCCTTTCAACTCTCATGAAGTGTGATCATTGTGGTGAAACTTCATGGCAGACGGGCGATTTTGTTAAAGCCACTTGCGAAT
TTTGTGGCACTGAGAATTTGACTAAAGAAGGTGCCACTACTTGTGGTTACTTACCCCAAAATGCTGTTGTTAAAATTTATTG
TCCAGCATGTCACAATTCAGAAGTAGGACCTGAGCATAGTCTTGCCGAATACCATAATGAATCTGGCTTGAAAACCATTCT
TCGTAAGGGTGGTCGCACTATTGCCTTTGGAGGCTGTGTGTTCTCTTATGTTGGTTGCCATAACAAGTGTGCCTATTGGGT
TCCACGTGCTAGCGCTAACATAGGTTGTAACCATACAGGTGTTGTTGGAGAAGGTTCCGAAGGTCTTAATGACAACCTTCT
TGAAATACTCCAAAAAGAGAAAGTCAACATCAATATTGTTGGTGACTTTAAACTTAATGAAGAGATCGCCATTATTTTGGC
ATCTTTTTCTGCTTCCACAAGTGCTTTTGTGGAAACTGTGAAAGGTTTGGATTATAAAGCATTCAAACAAATTGTTGAATCC
TGTGGTAATTTTAAAGTTACAAAAGGAAAAGCTAAAAAAGGTGCCTGGAATATTGGTGAACAGAAATCAATACTGAGTCC
TCTTTATGCATTTGCATCAGAGGCTGCTCGTGTTGTACGATCAATTTTCTCCCGCACTCTTGAAACTGCTCAAAATTCTGTGC
GTGTTTTACAGAAGGCCGCTATAACAATACTAGATGGAATTTCACAGTATTCACTGAGACTCATTGATGCTATGATGTTCA
CATCTGATTTGGCTACTAACAATCTAGTTGTAATGGCCTACATTACAGGTGGTGTTGTTCAGTTGACTTCGCAGTGGCTAA
CTAACATCTTTGGCACTGTTTATGAAAAACTCAAACCCGTCCTTGATTGGCTTGAAGAGAAGTTTAAGGAAGGTGTAGAGT
TTCTTAGAGACGGTTGGGAAATTGTTAAATTTATCTCAACCTGTGCTTGTGAAATTGTCGGTGGACAAATTGTCACCTGTG
CAAAGGAAATTAAGGAGAGTGTTCAGACATTCTTTAAGCTTGTAAATAAATTTTTGGCTTTGTGTGCTGACTCTATCATTAT
TGGTGGAGCTAAACTTAAAGCCTTGAATTTAGGTGAAACATTTGTCACGCACTCAAAGGGATTGTACAGAAAGTGTGTTA
AATCCAGAGAAGAAACTGGCCTACTCATGCCTCTAAAAGCCCCAAAAGAAATTATCTTCTTAGAGGGAGAAACACTTOCCA
CAGAAGTGTTAACAGAGGAAGTTGTCTTGAAAACTGGTGATTTACAACCATTAGAACAACCTACTAGTGAAGCTGTTGAA
GCTCCATTGGTTGGTACACCAGTTTGTATTAACGGGCTTATGTTGCTCGAAATCAAAGACACAGAAAAGTACTGTGCCCTT
GCACCTAATATGATGGTAACAAACAATACCTTCACACTCAAAGGCGGTGCACCAACAAAGGTTACTTTTGGTGATGACACT
GTGATAGAAGTGCAAGGTTACAAGAGTGTGAATATCACTTTTGAACTTGATGAAAGGATTGATAAAGTACTTAATGAGAA
GTGCTCTGCCTATACAGTTGAACTCGGTACAGAAGTAAATGAGTTCGCCTGTGTTGTGGCAGATGCTGTCATAAAAACTTT
GCAACCAGTATCTGAATTACTTACACCACTGGGCATTGATTTAGATGAGTGGAGTATGGCTACATACTACTTATTTGATGA
GTCTGGTGAGTTTAAATTGGCTTCACATATGTATTGTTCTTTCTACCCTCCAGATGAGGATGAAGAAGAAGGTGATTGTGA
AGAAGAAGAGTTTGAGCCATCAACTCAATATGAGTATGGTACTGAAGATGATTACCAAGGTAAACCTTTGGAATTTGGTG
CCACTTCTGCTGCTCTTCAACCTGAAGAAGAGCAAGAAGAAGATTGGTTAGATGATGATAGTCAACAAACTGTTGGTCAA
CAAGACGGCAGTGAGGACAATCAGACAACTACTATTCAAACAATTGTTGAGGTTCAACCTCAATTAGAGATGGAACTTAC
ACCAGTTGTTCAGACTATTGAAGTGAATAGTTTTAGTGGTTATTTAAAACTTACTGACAATGTATACATTAAAAATGCAGA
CATTGTGGAAGAAGCTAAAAAGGTAAAACCAACAGTGGTTGTTAATGCAGCCAATGTTTACCTTAAACATGGAGGAGGT
GTTGCAGGAGCCTTAAATAAGGCTACTAACAATGCCATGCAAGTTGAATCTGATGATTACATAGCTACTAATGGACCACTT
AAAGTGGGTGGTAGTTGTGTTTTAAGCGGACACAATCTTGCTAAACACTGTCTTCATGTTGTCGGCCCAAATGTTAACAAA
GGTGAAGACATTCAACTTCTTAAGAGTGCTTATGAAAATTTTAATCAGCACGAAGTTCTACTTGCACCATTATTATCAGCTG
GTATTTTTGGTGCTGACCCTATACATTCTTTAAGAGTTTGTGTAGATACTGTTCGCACAAATGTCTACTTAGCTGTCTTTGAT
AAAAATCTCTATGACAAACTTGTTTCAAGCTTTTTGGAAATGAAGAGTGAAAAGCAAGTTGAACAAAAGATCGCTGAGAT
TCCTAAAGAGGAAGTTAAGCCATTTATAACTGAAAGTAAACCTTCAGTTGAACAGAGAAAACAAGATGATAAGAAAATCA
AAGCTTGTGTTGAAGAAGTTACAACAACTCTGGAAGAAACTAAGTTCCTCACAGAAAACTTGTTACTTTATATTGACATTA
ATGGCAATCTTCATCCAGATTCTGCCACTCTTGTTAGTGACATTGACATCACTTTCTTAAAGAAAGATGCTCCATATATAGT
GGGTGATGTTGTTCAAGAGGGTGTTTTAACTGCTGTGGTTATACCTACTAAAAAGGCTGGTGGCACTACTGAAATGCTAG
CGAAAGCTTTGAGAAAAGTGCCAACAGACAATTATATAACCACTTACCCGGGTCAGGGTTTAAATGGTTACACTGTAGAG
GAGGCAAAGACAGTGCTTAAAAAGTGTAAAAGTGCCTTTTACATTCTACCATCTATTATCTCTAATGAGAAGCAAGAAATT
CTTGGAACTGTTTCTTGGAATTTGCGAGAAATGCTTGCACATGCAGAAGAAACACGCAAATTAATGCCTGTCTGTGTGGA
AACTAAAGCCATAGTTTCAACTATACAGCGTAAATATAAGGGTATTAAAATACAAGAGGGTGTGGTTGATTATGGTGCTA
GATTTTACTTTTACACCAGTAAAACAACTGTAGCGTCACTTATCAACACACTTAACGATCTAAATGAAACTCTTGTTACAAT
GCCACTTGGCTATGTAACACATGGCTTAAATTTGGAAGAAGCTGCTCGGTATATGAGATCTCTCAAAGTGCCAGCTACAGT
TTCTGTTTCTTCACCTGATGCTGTTACAGCGTATAATGGTTATCTTACTTCTTCTTCTAAAACACCTGAAGAACATTTTATTG
AAACCATCTCACTTGCTGGTTCCTATAAAGATTGGTCCTATTCTGGACAATCTACACAACTAGGTATAGAATTTCTTAAGAG
AGGTGATAAAAGTGTATATTACACTAGTAATCCTACCACATTCCACCTAGATGGTGAAGTTATCACCTTTGACAATCTTAAG
ACACTTCTTTCTTTGAGAGAAGTGAGGACTATTAAGGTGTTTACAACAGTAGACAACATTAACCTCCACACGCAAGTTGTG
GACATGTCAATGACATATGGACAACAGTTTGGTCCAACTTATTTGGATGGAGCTGATGTTACTAAAATAAAACCTCATAAT
TCACATGAAGGTAAAACATTTTATGTTTTACCTAATGATGACACTCTACGTGTTGAGGCTTTTGAGTACTACCACACAACTG
ATCCTAGTTTTCTGGGTAGGTACATGTCAGCATTAAATCACACTAAAAAGTGGAAATACCCACAAGTTAATGGTTTAACTT
CTATTAAATGGGCAGATAACAACTGTTATCTTGCCACTGCATTGTTAACACTCCAACAAATAGAGTTGAAGTTTAATCCACC
TGCTCTACAAGATGCTTATTACAGAGCAAGGGCTGGTGAAGCTGCTAACTTTTGTGCACTTATCTTAGCCTACTGTAATAA
GACAGTAGGTGAGTTAGGTGATGTTAGAGAAACAATGAGTTACTTGTTTCAACATGCCAATTTAGATTCTTGCAAAAGAG
TCTTGAACGTGGTGTGTAAAACTTGTGGACAACAGCAGACAACCCTTAAGGGTGTAGAAGCTGTTATGTACATGGGCACA
CTTTCTTATGAACAATTTAAGAAAGGTGTTCAGATACCTTGTACGTGTGGTAAACAAGCTACAAAATATCTAGTACAACAG
GAGTCACCTTTTGTTATGATGTCAGCACCACCTGCTCAGTATGAACTTAAGCATGGTACATTTACTTGTGCTAGTGAGTACA
CTGGTAATTACCAGTGTGGTCACTATAAACATATAACTTCTAAAGAAACTTTGTATTGCATAGACGGTGCTTTACTTACAAA
GTCCTCAGAATACAAAGGTCCTATTACGGATGTTTTCTACAAAGAAAACAGTTACACAACAACCATAAAACCAGTTACTTA
TAAATTGGATGGTGTTGTTTGTACAGAAATTGACCCTAAGTTGGACAATTATTATAAGAAAGACAATTCTTATTTCACAGA
GCAACCAATTGATCTTGTACCAAACCAACCATATCCAAACGCAAGCTTCGATAATTTTAAGTTTGTATGTGATAATATCAAA
TTTGCTGATGATTTAAACCAGTTAACTGGTTATAAGAAACCTGCTTCAAGAGAGCTTAAAGTTACATTTTTCCCTGACTTAA
ATGGTGATGTGGTGGCTATTGATTATAAACACTACACACCCTCTTTTAAGAAAGGAGCTAAATTGTTACATAAACCTATTG
TTTGGCATGTTAACAATGCAACTAATAAAGCCACGTATAAACCAAATACCTGGTGTATACGTTGTCTTTGGAGCACAAAAC
CAGTTGAAACATCAAATTCGTTTGATGTACTGAAGTCAGAGGACGCGCAGGGAATGGATAATCTTGCCTGCGAAGATCTA
AAACCAGTCTCTGAAGAAGTAGTGGAAAATCCTACCATACAGAAAGACGTTCTTGAGTGTAATGTGAAAACTACCGAAGT
TGTAGGAGACATTATACTTAAACCAGCAAATAATAGTTTAAAAATTACAGAAGAGGTTGGCCACACAGATCTAATGGCTG
CTTATGTAGACAATTCTAGTCTTACTATTAAGAAACCTAATGAATTATCTAGAGTATTAGGTTTGAAAACCCTTGCTACTCA
TGGTTTAGCTGCTGTTAATAGTGTCCCTTGGGATACTATAGCTAATTATGCTAAGCCTTTTCTTAACAAAGTTGTTAGTACA
ACTACTAACATAGTTACACGGTGTTTAAACCGTGTTTGTACTAATTATATGCCTTATTTCTTTACTTTATTGCTACAATTGTG
TACTTTTACTAGAAGTACAAATTCTAGAATTAAAGCATCTATGCCGACTACTATAGCAAAGAATACTGTTAAGAGTGTCGG
TAAATTTTGTCTAGAGGCTTCATTTAATTATTTGAAGTCACCTAATTTTTCTAAACTGATAAATATTATAATTTGGTTTTTACT
ATTAAGTGTTTGCCTAGGTTCTTTAATCTACTCAACCGCTGCTTTAGGTGTTTTAATGTCTAATTTAGGCATGCCTTCTTACT
GTACTGGTTACAGAGAAGGCTATTTGAACTCTACTAATGTCACTATTGCAACCTACTGTACTGGTTCTATACCTTGTAGTGT
TTGTCTTAGTGGTTTAGATTCTTTAGACACCTATCCTTCTTTAGAAACTATACAAATTACCATTTCATCTTTTAAATGGGATTT
AACTGCTTTTGGCTTAGTTGCAGAGTGGTTTTTGGCATATATTCTTTTCACTAGGTTTTTCTATGTACTTGGATTGGCTGCAA
TCATGCAATTGTTTTTCAGCTATTTTGCAGTACATTTTATTAGTAATTCTTGGCTTATGTGGTTAATAATTAATCTTGTACAA
ATGGCCCCGATTTCAGCTATGGTTAGAATGTACATCTTCTTTGCATCATTTTATTATGTATGGAAAAGTTATGTGCATGTTG
TAGACGGTTGTAATTCATCAACTTGTATGATGTGTTACAAACGTAATAGAGCAACAAGAGTCGAATGTACAACTATTGTTA
ATGGTGTTAGAAGGTCCTTTTATGTCTATGCTAATGGAGGTAAAGGCTTTTGCAAACTACACAATTGGAATTGTGTTAATT
GTGATACATTCTGTGCTGGTAGTACATTTATTAGTGATGAAGTTGCGAGAGACTTGTCACTACAGTTTAAAAGACCAATAA
ATCCTACTGACCAGTCTTCTTACATCGTTGATAGTGTTACAGTGAAGAATGGTTCCATCCATCTTTACTTTGATAAAGCTGG
TCAAAAGACTTATGAAAGACATTCTCTCTCTCATTTTGTTAACTTAGACAACCTGAGAGCTAATAACACTAAAGGTTCATTG
CCTATTAATGTTATAGTTTTTGATGGTAAATCAAAATGTGAAGAATCATCTGCAAAATCAGCGTCTGTTTACTACAGTCAGC
TTATGTGTCAACCTATACTGTTACTAGATCAGGCATTAGTGTCTGATGTTGGTGATAGTGCGGAAGTTGCAGTTAAAATGT
TTGATGCTTACGTTAATACGTTTTCATCAACTTTTAACGTACCAATGGAAAAACTCAAAACACTAGTTGCAACTGCAGAAGC
TGAACTTGCAAAGAATGTGTCCTTAGACAATGTCTTATCTACTTTTATTTCAGCAGCTCGGCAAGGGTTTGTTGATTCAGAT
GTAGAAACTAAAGATGTTGTTGAATGTCTTAAATTGTCACATCAATCTGACATAGAAGTTACTGGCGATAGTTGTAATAAC
TATATGCTCACCTATAACAAAGTTGAAAACATGACACCCCGTGACCTTGGTGCTTGTATTGACTGTAGTGCGCGTCATATT
AATGCGCAGGTAGCAAAAAGTCACAACATTGCTTTGATATGGAACGTTAAAGATTTCATGTCATTGTCTGAACAACTACGA
AAACAAATACGTAGTGCTGCTAAAAAGAATAACTTACCTTTTAAGTTGACATGTGCAACTACTAGACAAGTTGTTAATGTT
GTAACAACAAAGATAGCACTTAAGGGTGGTAAAATTGTTAATAATTGGTTGAAGCAGTTAATTAAAGTTACACTTGTGTTC
CTTTTTGTTGCTGCTATTTTCTATTTAATAACACCTGTTCATGTCATGTCTAAACATACTGACTTTTCAAGTGAAATCATAGG
ATACAAGGCTATTGATGGTGGTGTCACTCGTGACATAGCATCTACAGATACTTGTTTTGCTAACAAACATGCTGATTTTGA
CACATGGTTTAGCCAGCGTGGTGGTAGTTATACTAATGACAAAGCTTGCCCATTGATTGCTGCAGTCATAACAAGAGAAG
TGGGTTTTGTCGTGCCTGGTTTGCCTGGCACGATATTACGCACAACTAATGGTGACTTTTTGCATTTCTTACCTAGAGTTTT
TAGTGCAGTTGGTAACATCTGTTACACACCATCAAAACTTATAGAGTACACTGACTTTGCAACATCAGCTTGTGTTTTGGCT
GCTGAATGTACAATTTTTAAAGATGCTTCTGGTAAGCCAGTACCATATTGTTATGATACCAATGTACTAGAAGGTTCTGTTG
CTTATGAAAGTTTACGCCCTGACACACGTTATGTGCTCATGGATGGCTCTATTATTCAATTTCCTAACACCTACCTTGAAGG
TTCTGTTAGAGTGGTAACAACTTTTGATTCTGAGTACTGTAGGCACGGCACTTGTGAAAGATCAGAAGCTGGTGTTTGTGT
ATCTACTAGTGGTAGATGGGTACTTAACAATGATTATTACAGATCTTTACCAGGAGTTTTCTGTGGTGTAGATGCTGTAAA
TTTACTTACTAATATGTTTACACCACTAATTCAACCTATTGGTGCTTTGGACATATCAGCATCTATAGTAGCTGGTGGTATT
GTAGCTATCGTAGTAACATGCCTTGCCTACTATTTTATGAGGTTTAGAAGAGCTTTTGGTGAATACAGTCATGTAGTTGCCT
TTAATACTTTACTATTCCTTATGTCATTCACTGTACTCTGTTTAACACCAGTTTACTCATTCTTACCTGGTGTTTATTCTGTTAT
TTACTTGTACTTGACATTTTATCTTACTAATGATGTTTCTTTTTTAGCACATATTCAGTGGATGGTTATGTTCACACCTTTAGT
ACCTTTCTGGATAACAATTGCTTATATCATTTGTATTTCCACAAAGCATTTCTATTGGTTCTTTAGTAATTACCTAAAGAGAC
GTGTAGTCTTTAATGGTGTTTCCTTTAGTACTTTTGAAGAAGCTGCGCTGTGCACCTTTTTGTTAAATAAAGAAATGTATCT
AAAGTTGCGTAGTGATGTGCTATTACCTCTTACGCAATATAATAGATACTTAGCTCTTTATAATAAGTACAAGTATTTTAGT
GGAGCAATGGATACAACTAGCTACAGAGAAGCTGCTTGTTGTCATCTCGCAAAGGCTCTCAATGACTTCAGTAACTCAGG
TTCTGATGTTCTTTACCAACCACCACAAACCTCTATCACCTCAGCTGTTTTGCAGAGTGGTTTTAGAAAAATGGCATTCCCA
TCTGGTAAAGTTGAGGGTTGTATGGTACAAGTAACTTGTGGTACAACTACACTTAACGGTCTTTGGCTTGATGACGTAGTT
TACTGTCCAAGACATGTGATCTGCACCTCTGAAGACATGCTTAACCCTAATTATGAAGATTTACTCATTCGTAAGTCTAATC
ATAATTTCTTGGTACAGGCTGGTAATGTTCAACTCAGGGTTATTGGACATTCTATGCAAAATTGTGTACTTAAGCTTAAGG
TTGATACAGCCAATCCTAAGACACCTAAGTATAAGTTTGTTCGCATTCAACCAGGACAGACTTTTTCAGTGTTAGCTTGTTA
CAATGGTTCACCATCTGGTGTTTACCAATGTGCTATGAGGCCCAATTTCACTATTAAGGGTTCATTCCTTAATGGTTCATGT
GGTAGTGTTGGTTTTAACATAGATTATGACTGTGTCTCTTTTTGTTACATGCACCATATGGAATTACCAACTGGAGTTCATG
CTGGCACAGACTTAGAAGGTAACTTTTATGGACCTTTTGTTGACAGGCAAACAGCACAAGCAGCTGGTACGGACACAACT
ATTACAGTTAATGTTTTAGCTTGGTTGTACGCTGCTGTTATAAATGGAGACAGGTGGTTTCTCAATCGATTTACCACAACTC
TTAATGACTTTAACCTTGTGGCTATGAAGTACAATTATGAACCTCTAACACAAGACCATGTTGACATACTAGGACCTCTTTC
TGCTCAAACTGGAATTGCCGTTTTAGATATGTGTGCTTCATTAAAAGAATTACTGCAAAATGGTATGAATGGACGTACCAT
ATTGGGTAGTGCTTTATTAGAAGATGAATTTACACCTTTTGATGTTGTTAGACAATGCTCAGGTGTTACTTTCCAAAGTGCA
GTGAAAAGAACAATCAAGGGTACACACCACTGGTTGTTACTCACAATTTTGACTTCACTTTTAGTTTTAGTCCAGAGTACTC
AATGGTCTTTGTTCTTTTTTTTGTATGAAAATGCCTTTTTACCTTTTGCTATGGGTATTATTGCTATGTCTGCTTTTGCAATGA
TGTTTGTCAAACATAAGCATGCATTTCTCTGTTTGTTTTTGTTACCTTCTCTTGCCACTGTAGCTTATTTTAATATGGTCTATA
TGCCTGCTAGTTGGGTGATGCGTATTATGACATGGTTGGATATGGTTGATACTAGTTTGTCTGGTTTTAAGCTAAAAGACT
GTGTTATGTATGCATCAGCTGTAGTGTTACTAATCCTTATGACAGCAAGAACTGTGTATGATGATGGTGCTAGGAGAGTG
TGGACACTTATGAATGTCTTGACACTCGTTTATAAAGTTTATTATGGTAATGCTTTAGATCAAGCCATTTCCATGTGGGCTC
TTATAATCTCTGTTACTTCTAACTACTCAGGTGTAGTTACAACTGTCATGTTTTTGGCCAGAGGTATTGTTTTTATGTGTGTT
GAGTATTGCCCTATTTTCTTCATAACTGGTAATACACTTCAGTGTATAATGCTAGTTTATTGTTTCTTAGGCTATTTTTGTACT
TGTTACTTTGGCCTCTTTTGTTTACTCAACCGCTACTTTAGACTGACTCTTGGTGTTTATGATTACTTAGTTTCTACACAGGA
GTTTAGATATATGAATTCACAGGGACTACTCCCACCCAAGAATAGCATAGATGCCTTCAAACTCAACATTAAATTGTTGGG
TGTTGGTGGCAAACCTTGTATCAAAGTAGCCACTGTACAGTCTAAAATGTCAGATGTAAAGTGCACATCAGTAGTCTTACT
CTCAGTTTTGCAACAACTCAGAGTAGAATCATCATCTAAATTGTGGGCTCAATGTGTCCAGTTACACAATGACATTCTCTTA
GCTAAAGATACTACTGAAGCCTTTGAAAAAATGGTTTCACTACTTTCTGTTTTGCTTTCCATGCAGGGTGCTGTAGACATAA
ACAAGCTTTGTGAAGAAATGCTGGACAACAGGGCAACCTTACAAGCTATAGCCTCAGAGTTTAGTTCCCTTCCATCATATG
CAGCTTTTGCTACTGCTCAAGAAGCTTATGAGCAGGCTGTTGCTAATGGTGATTCTGAAGTTGTTCTTAAAAAGTTGAAGA
AGTCTTTGAATGTGGCTAAATCTGAATTTGACCGTGATGCAGCCATGCAACGTAAGTTGGAAAAGATGGCTGATCAAGCT
ATGACCCAAATGTATAAACAGGCTAGATCTGAGGACAAGAGGGCAAAAGTTACTAGTGCTATGCAGACAATGCTTTTCAC
TATGCTTAGAAAGTTGGATAATGATGCACTCAACAACATTATCAACAATGCAAGAGATGGTTGTGTTCCCTTGAACATAAT
ACCTCTTACAACAGCAGCCAAACTAATGGTTGTCATACCAGACTATAACACATATAAAAATACGTGTGATGGTACAACATT
TACTTATGCATCAGCATTGTGGGAAATCCAACAGGTTGTAGATGCAGATAGTAAAATTGTTCAACTTAGTGAAATTAGTAT
GGACAATTCACCTAATTTAGCATGGCCTCTTATTGTAACAGCTTTAAGGGCCAATTCTGCTGTCAAATTACAGAATAATGA
GCTTAGTCCTGTTGCACTACGACAGATGTCTTGTGCTGCCGGTACTACACAAACTGCTTGCACTGATGACAATGCGTTAGC
TTACTACAACACAACAAAGGGAGGTAGGTTTGTACTTGCACTGTTATCCGATTTACAGGATTTGAAATGGGCTAGATTCCC
TAAGAGTGATGGAACTGGTACTATCTATACAGAACTGGAACCACCTTGTAGGTTTGTTACAGACACACCTAAAGGTCCTAA
AGTGAAGTATTTATACTTTATTAAAGGATTAAACAACCTAAATAGAGGTATGGTACTTGGTAGTTTAGCTGCCACAGTACG
TCTACAAGCTGGTAATGCAACAGAAGTGCCTGCCAATTCAACTGTATTATCTTTCTGTGCTTTTGCTGTAGATGCTGCTAAA
GCTTACAAAGATTATCTAGCTAGTGGGGGACAACCAATCACTAATTGTGTTAAGATGTTGTGTACACACACTGGTACTGGT
CAGGCAATAACAGTTACACCGGAAGCCAATATGGATCAAGAATCCTTTGGTGGTGCATCGTGTTGTCTGTACTGCCGTTGC
CACATAGATCATCCAAATCCTAAAGGATTTTGTGACTTAAAAGGTAAGTATGTACAAATACCTACAACTTGTGCTAATGAC
CCTGTGGGTTTTACACTTAAAAACACAGTCTGTACCGTCTGCGGTATGTGGAAAGGTTATGGCTGTAGTTGTGATCAACTC
CGCGAACCCATGCTTCAGTCAGCTGATGCACAATCGTTTTTAAACGGGTTTGCGGTGTAAGTGCAGCCCGTCTTACACCGT
GCGGCACAGGCACTAGTACTGATGTCGTATACAGGGCTTTTGACATCTACAATGATAAAGTAGCTGGTTTTGCTAAATTCC
TAAAAACTAATTGTTGTCGCTTCCAAGAAAAGGACGAAGATGACAATTTAATTGATTCTTACTTTGTAGTTAAGAGACACA
CTTTCTCTAACTACCAACATGAAGAAACAATTTATAATTTACTTAAGGATTGTCCAGCTGTTGCTAAACATGACTTCTTTAA
GTTTAGAATAGACGGTGACATGGTACCACATATATCACGTCAACGTCTTACTAAATACACAATGGCAGACCTCGTCTATGC
TTTAAGGCATTTTGATGAAGGTAATTGTGACACATTAAAAGAAATACTTGTCACATACAATTGTTGTGATGATGATTATTTC
AATAAAAAGGACTGGTATGATTTTGTAGAAAACCCAGATATATTACGCGTATACGCCAACTTAGGTGAACGTGTACGCCA
AGCTTTGTTAAAAACAGTACAATTCTGTGATGCCATGCGAAATGCTGGTATTGTTGGTGTACTGACATTAGATAATCAAGA
TCTCAATGGTAACTGGTATGATTTCGGTGATTTCATACAAACCACGCCAGGTAGTGGAGTTCCTGTTGTAGATTCTTATTAT
TCATTGTTAATGCCTATATTAACCTTGACCAGGGCTTTAACTGCAGAGTCACATGTTGACACTGACTTAACAAAGCCTTACA
TTAAGTGGGATTTGTTAAAATATGACTTCACGGAAGAGAGGTTAAAACTCTTTGACCGTTATTTTAAATATTGGGATCAGA
CATACCACCCAAATTGTGTTAACTGTTTGGATGACAGATGCATTCTGCATTGTGCAAACTTTAATGTTTTATTCTCTACAGT
GTTCCCACCTACAAGTTTTGGACCACTAGTGAGAAAAATATTTGTTGATGGTGTTCCATTTGTAGTTTCAACTGGATACCAC
TTCAGAGAGCTAGGTGTTGTACATAATCAGGATGTAAACTTACATAGCTCTAGACTTAGTTTTAAGGAATTACTTGTGTAT
GCTGCTGACCCTGCTATGCACGCTGCTTCTGGTAATCTATTACTAGATAAACGCACTACGTGCTTTTCAGTAGCTGCACTTA
CTAACAATGTTGCTTTTCAAACTGTCAAACCCGGTAATTTTAACAAAGACTTCTATGACTTTGCTGTGTCTAAGGGTTTCTTT
AAGGAAGGAAGTTCTGTTGAATTAAAACACTTCTTCTTTGCTCAGGATGGTAATGCTGCTATCAGCGATTATGACTACTAT
CGTTATAATCTACCAACAATGTGTGATATCAGACAACTACTATTTGTAGTTGAAGTTGTTGATAAGTACTTTGATTGTTACG
ATGGTGGCTGTATTAATGCTAACCAAGTCATCGTCAACAACCTAGACAAATCAGCTGGTTTTCCATTTAATAAATGGGGTA
AGGCTAGACTTTATTATGATTCAATGAGTTATGAGGATCAAGATGCACTTTTCGCATATACAAAACGTAATGTCATCCCTAC
TATAACTCAAATGAATCTTAAGTATGCCATTAGTGCAAAGAATAGAGCTCGCACCGTAGCTGGTGTCTCTATCTGTAGTAC
TATGACCAATAGACAGTTTCATCAAAAATTATTGAAATCAATAGCCGCCACTAGAGGAGCTACTGTAGTAATTGGAACAA
GCAAATTCTATGGTGGTTGGCACAACATGTTAAAAACTGTTTATAGTGATGTAGAAAACCCTCACCTTATGGGTTGGGATT
ATCCTAAATGTGATAGAGCCATGCCTAACATGCTTAGAATTATGGCCTCACTTGTTCTTGCTCGCAAACATACAACGTGTTG
TAGCTTGTCACACCGTTTCTATAGATTAGCTAATGAGTGTGCTCAAGTATTGAGTGAAATGGTCATGTGTGGCGGTTCACT
ATATGTTAAACCAGGTGGAACCTCATCAGGAGATGCCACAACTGCTTATGCTAATAGTGTTTTTAACATTTGTCAAGCTGT
CACGGCCAATGTTAATGCACTTTTATCTACTGATGGTAACAAAATTGCCGATAAGTATGTCCGCAATTTACAACACAGACTT
TATGAGTGTCTCTATAGAAATAGAGATGTTGACACAGACTTTGTGAATGAGTTTTACGCATATTTGCGTAAACATTTCTCAA
TGATGATACTCTCTGACGATGCTGTTGTGTGTTTCAATAGCACTTATGCATCTCAAGGTCTAGTGGCTAGCATAAAGAACT
TTAAGTCAGTTCTTTATTATCAAAACAATGTTTTTATGTCTGAAGCAAAATGTTGGACTGAGACTGACCTTACTAAAGGACC
TCATGAATTTTGCTCTCAACATACAATGCTAGTTAAACAGGGTGATGATTATGTGTACCTTCCTTACCCAGATCCATCAAGA
ATCCTAGGGGCCGGCTGTTTTGTAGATGATATCGTAAAAACAGATGGTACACTTATGATTGAACGGTTCGTGTCTTTAGCT
ATAGATGCTTACCCACTTACTAAACATCCTAATCAGGAGTATGCTGATGTCTTTCATTTGTACTTACAATACATAAGAAAGC
TACATGATGAGTTAACAGGACACATGTTAGACATGTATTCTGTTATGCTTACTAATGATAACACTTCAAGGTATTGGGAAC
CTGAGTTTTATGAGGCTATGTACACACCGCATACAGTCTTACAGGCTGTTGGGGCTTGTGTTCTTTGCAATTCACAGACTTC
ATTAAGATGTGGTGCTTGCATACGTAGACCATTCTTATGTTGTAAATGCTGTTACGACCATGTCATATCAACATCACATAAA
TTAGTCTTGTCTGTTAATCCGTATGTTTGCAATGCTCCAGGTTGTGATGTCACAGATGTGACTCAACTTTACTTAGGAGGTA
TGAGCTATTATTGTAAATCACATAAACCACCCATTAGTTTTCCATTGTGTGCTAATGGACAAGTTTTTGGTTTATATAAAAA
TACATGTGTTGGTAGCGATAATGTTACTGACTTTAATGCAATTGCAACATGTGACTGGACAAATGCTGGTGATTACATTTT
AGCTAACACCTGTACTGAAAGACTCAAGCTTTTTGCAGCAGAAACGCTCAAAGCTACTGAGGAGACATTTAAACTGTCTTA
TGGTATTGCTACTGTACGTGAAGTGCTGTCTGACAGAGAATTACATCTTTCATGGGAAGTTGGTAAACCTAGACCACCACT
TAACCGAAATTATGTCTTTACTGGTTATCGTGTAACTAAAAACAGTAAAGTACAAATAGGAGAGTACACCTTTGAAAAAGG
TGACTATGGTGATGCTGTTGTTTACCGAGGTACAACAACTTACAAATTAAATGTTGGTGATTATTTTGTGCTGACATCACAT
ACAGTAATGCCATTAAGTGCACCTACACTAGTGCCACAAGAGCACTATGTTAGAATTACTGGCTTATACCCAACACTCAAT
ATCTCAGATGAGTTTTCTAGCAATGTTGCAAATTATCAAAAGGTTGGTATGCAAAAGTATTCTACACTCCAGGGACCACCT
GGTACTGGTAAGAGTCATTTTGCTATTGGCCTAGCTCTCTACTACCCTTCTGCTCGCATAGTGTATACAGCTTGCTCTCATG
CCGCTGTTGATGCACTATGTGAGAAGGCATTAAAATATTTGCCTATAGATAAATGTAGTAGAATTATACCTGCACGTGCTC
GTGTAGAGTGTTTTGATAAATTCAAAGTGAATTCAACATTAGAACAGTATGTCTTTTGTACTGTAAATGCATTGCCTGAGA
CGACAGCAGATATAGTTGTCTTTGATGAAATTTCAATGGCCACAAATTATGATTTGAGTGTTGTCAATGCCAGATTACGTG
CTAAGCACTATGTGTACATTGGCGACCCTGCTCAATTACCTGCACCACGCACATTGCTAACTAAGGGCACACTAGAACCAG
AATATTTCAATTCAGTGTGTAGACTTATGAAAACTATAGGTCCAGACATGTTCCTCGGAACTTGTCGGCGTTGTCCTGCTG
AAATTGTTGACACTGTGAGTGCTTTGGTTTATGATAATAAGCTTAAAGCACATAAAGACAAATCAGCTCAATGCTTTAAAA
TGTTTTATAAGGGTGTTATCACGCATGATGTTTCATCTGCAATTAACAGGCCACAAATAGGCGTGGTAAGAGAATTCCTTA
CACGTAACCCTGCTTGGAGAAAAGCTGTCTTTATTTCACCTTATAATTCACAGAATGCTGTAGCCTCAAAGATTTTGGGACT
ACCAACTCAAACTGTTGATTCATCACAGGGCTCAGAATATGACTATGTCATATTCACTCAAACCACTGAAACAGCTCACTCT
TGTAATGTAAACAGATTTAATGTTGCTATTACCAGAGCAAAAGTAGGCATACTTTGCATAATGTCTGATAGAGACCTTTAT
GACAAGTTGCAATTTACAAGTCTTGAAATTCCACGTAGGAATGTGGCAACTTTACAAGCTGAAAATGTAACAGGACTCTTT
AAAGATTGTAGTAAGGTAATCACTGGGTTACATCCTACACAGGCACCTACACACCTCAGTGTTGACACTAAATTCAAAACT
GAAGGTTTATGTGTTGACATACCTGGCATACCTAAGGACATGACCTATAGAAGACTCATCTCTATGATGGGTTTTAAAATG
AATTATCAAGTTAATGGTTACCCTAACATGTTTATCACCCGCGAAGAAGCTATAAGACATGTACGTGCATGGATTGGCTTC
GATGTCGAGGGGTGTCATGCTACTAGAGAAGCTGTTGGTACCAATTTACCTTTACAGCTAGGTTTTTCTACAGGTGTTAAC
CTAGTTGCTGTACCTACAGGTTATGTTGATACACCTAATAATACAGATTTTTCCAGAGTTAGTGCTAAACCACCGCCTGGA
GATCAATTTAAACACCTCATACCACTTATGTACAAAGGACTTCCTTGGAATGTAGTGCGTATAAAGATTGTACAAATGTTA
AGTGACACACTTAAAAATCTCTCTGACAGAGTCGTATTTGTCTTATGGGCACATGGCTTTGAGTTGACATCTATGAAGTATT
TTGTGAAAATAGGACCTGAGCGCACCTGTTGTCTATGTGATAGACGTGCCACATGCTTTTCCACTGCTTCAGACACTTATG
CCTGTTGGCATCATTCTATTGGATTTGATTACGTCTATAATCCGTTTATGATTGATGTTCAACAATGGGGTTTTACAGGTAA
CCTACAAAGCAACCATGATCTGTATTGTCAAGTCCATGGTAATGCACATGTAGCTAGTTGTGATGCAATCATGACTAGGTG
TCTAGCTGTCCACGAGTGCTTTGTTAAGCGTGTTGACTGGACTATTGAATATCCTATAATTGGTGATGAACTGAAGATTAA
TGCGGCTTGTAGAAAGGTTCAACACATGGTTGTTAAAGCTGCATTATTAGCAGACAAATTCCCAGTTCTTCACGACATTGG
TAACCCTAAAGCTATTAAGTGTGTACCTCAAGCTGATGTAGAATGGAAGTTCTATGATGCACAGCCTTGTAGTGACAAAGC
TTATAAAATAGAAGAATTATTCTATTCTTATGCCACACATTCTGACAAATTCACAGATGGTGTATGCCTATTTTGGAATTGC
AATGTCGATAGATATCCTGCTAATTCCATTGTTTGTAGATTTGACACTAGAGTGCTATCTAACCTTAACTTGCCTGGTTGTG
ATGGTGGCAGTTTGTATGTAAATAAACATGCATTCCACACACCAGCTTTTGATAAAAGTGCTTTTGTTAATTTAAAACAATT
ACCATTTTTCTATTACTCTGACAGTCCATGTGAGTCTCATGGAAAACAAGTAGTGTCAGATATAGATTATGTACCACTAAAG
TCTGCTACGTGTATAACACGTTGCAATTTAGGTGGTGCTGTCTGTAGACATCATGCTAATGAGTACAGATTGTATCTCGAT
GCTTATAACATGATGATCTCAGCTGGCTTTAGCTTGTGGGTTTACAAACAATTTGATACTTATAACCTCTGGAACACTTTTA
CAAGACTTCAGAGTTTAGAAAATGTGGCTTTTAATGTTGTAAATAAGGGACACTTTGATGGACAACAGGGTGAAGTACCA
GTTTCTATCATTAATAACACTGTTTACACAAAAGTTGATGGTGTTGATGTAGAATTGTTTGAAAATAAAACAACATTACCTG
TTAATGTAGCATTTGAGCTTTGGGCTAAGCGCAACATTAAACCAGTACCAGAGGTGAAAATACTCAATAATTTGGGTGTG
GACATTGCTGCTAATACTGTGATCTGGGACTACAAAAGAGATGCTCCAGCACATATATCTACTATTGGTGTTTGTTCTATG
ACTGACATAGCCAAGAAACCAACTGAAACGATTTGTGCACCACTCACTGTCTTTTTTGATGGTAGAGTTGATGGTCAAGTA
GACTTATTTAGAAATGCCCGTAATGGTGTTCTTATTACAGAAGGTAGTGTTAAAGGTTTACAACCATCTGTAGGTCCCAAA
CAAGCTAGTCTTAATGGAGTCACATTAATTGGAGAAGCCGTAAAAACACAGTTCAATTATTATAAGAAAGTTGATGGTGTT
GTCCAACAATTACCTGAAACTTACTTTACTCAGAGTAGAAATTTACAAGAATTTAAACCCAGGAGTCAAATGGAAATTGAT
TTCTTAGAATTAGCTATGGATGAATTCATTGAACGGTATAAATTAGAAGGCTATGCCTTCGAACATATCGTTTATGGAGAT
TTTAGTCATAGTCAGTTAGGTGGTTTACATCTACTGATTGGACTAGCTAAACGTTTTAAGGAATCACCTTTTGAATTAGAAG
ATTTTATTCCTATGGACAGTACAGTTAAAAACTATTTCATAACAGATGCGCAAACAGGTTCATCTAAGTGTGTGTGTTCTGT
TATTGATTTATTACTTGATGATTTTGTTGAAATAATAAAATCCCAAGATTTATCTGTAGTTTCTAAGGTTGTCAAAGTGACT
ATTGACTATACAGAAATTTCATTTATGCTTTGGTGTAAAGATGGCCATGTAGAAACATTTTACCCAAAATTACAATCTAGTC
AAGCGTGGCAACCGGGTGTTGCTATGCCTAATCTTTACAAAATGCAAAGAATGCTATTAGAAAAGTGTGACCTTCAAAATT
ATGGTGATAGTGCAACATTACCTAAAGGCATAATGATGAATGTCGCAAAATATACTCAACTGTGTCAATATTTAAACACAT
TAACATTAGCTGTACCCTATAATATGAGAGTTATACATTTTGGTGCTGGTTCTGATAAAGGAGTTGCACCAGGTACAGCTG
TTTTAAGACAGTGGTTGCCTACGGGTACGCTGCTTGTCGATTCAGATCTTAATGACTTTGTCTCTGATGCAGATTCAACTTT
GATTGGTGATTGTGCAACTGTACATACAGCTAATAAATGGGATCTCATTATTAGTGATATGTACGACCCTAAGACTAAAAA
TGTTACAAAAGAAAATGACTCTAAAGAGGGTTTTTTCACTTACATTTGTGGGTTTATACAACAAAAGCTAGCTCTTGGAGG
TTCCGTGGCTATAAAGATAACAGAACATTCTTGGAATGCTGATCTTTATAAGCTCATGGGACACTTCGCATGGTGGACAGC
CTTTGTTACTAATGTGAATGCGTCATCATCTGAAGCATTTTTAATTGGATGTAATTATCTTGGCAAACCACGCGAACAAATA
GATGGTTATGTCATGCATGCAAATTACATATTTTGGAGGAATACAAATCCAATTCAGTTGTCTTCCTATTCTTTATTTGACAT
GAGTAAATTTCCCCTTAAATTAAGGGGTACTGCTGTTATGTCTTTAAAAGAAGGTCAAATCAATGATATGATTTTATCTCTT
CTTAGTAAAGGTAGACTTATAATTAGAGAAAACAACAGAGTTGTTATTTCTAGTGATGTTCTTGTTAACAACTAAACGAAC
AATGTTTGTTTTTCTTGTTTTATTGCCACTAGTCTCTAGTCAGTGTGTTAATCTTACAACCAGAACTCAATTACCCCCTGCAT
ACACTAATTCTTTCACACGTGGTGTTTATTACCCTGACAAAGTTTTCAGATCCTCAGTTTTACATTCAACTCAGGACTTGTTC
TTACCTTTCTTTTCCAATGTTACTTGGTTCCATGCTATACATGTCTCTGGGACCAATGGTACTAAGAGGTTTGATAACCCTGT
CCTACCATTTAATGATGGTGTTTATTTTGCTTCCACTGAGAAGTCTAACATAATAAGAGGCTGGATTTTTGGTACTACTTTA
GATTCGAAGACCCAGTCCCTACTTATTGTTAATAACGCTACTAATGTTGTTATTAAAGTCTGTGAATTTCAATTTTGTAATG
ATCCATTTTTGGGTGTTTATTACCACAAAAACAACAAAAGTTGGATGGAAAGTGAGTTCAGAGTTTATTCTAGTGCGAATA
ATTGCACTTTTGAATATGTCTCTCAGCCTTTTCTTATGGACCTTGAAGGAAAACAGGGTAATTTCAAAAATCTTAGGGAATT
TGTGTTTAAGAATATTGATGGTTATTTTAAAATATATTCTAAGCACACGCCTATTAATTTAGTGCGTGATCTCCCTCAGGGT
TTTTCGGCTTTAGAACCATTGGTAGATTTGCCAATAGGTATTAACATCACTAGGTTTCAAACTTTACTTGCTTTACATAGAA
GTTATTTGACTCCTGGTGATTCTTCTTCAGGTTGGACAGCTGGTGCTGCAGCTTATTATGTGGGTTATCTTCAACCTAGGAC
TTTTCTATTAAAATATAATGAAAATGGAACCATTACAGATGCTGTAGACTGTGCACTTGACCCTCTCTCAGAAACAAAGTG
TACGTTGAAATCCTTCACTGTAGAAAAAGGAATCTATCAAACTTCTAACTTTAGAGTCCAACCAACAGAATCTATTGTTAGA
TTTCCTAATATTACAAACTTGTGCCCTTTTGGTGAAGTTTTTAACGCCACCAGATTTGCATCTGTTTATGCTTGGAACAGGA
AGAGAATCAGCAACTGTGTTGCTGATTATTCTGTCCTATATAATTCCGCATCATTTTCCACTTTTAAGTGTTATGGAGTGTCT
CCTACTAAATTAAATGATCTCTGCTTTACTAATGTCTATGCAGATTCATTTGTAATTAGAGGTGATGAAGTCAGACAAATCG
CTCCAGGGCAAACTGGAAAGATTGCTGATTATAATTATAAATTACCAGATGATTTTACAGGCTGCGTTATAGCTTGGAATT
CTAACAATCTTGATTCTAAGGTTGGTGGTAATTATAATTACCTGTATAGATTGTTTAGGAAGTCTAATCTCAAACCTTTTGÅ
GAGAGATATTTCAACTGAAATCTATCAGGCCGGTAGCACACCTTGTAATGGTGTTGAAGGTTTTAATTGTTACTTTCCTTTA
CAATCATATGGTTTCCAACCCACTAATGGTGTTGGTTACCAACCATACAGAGTAGTAGTACTTTCTTTTGAACTTCTACATG
CACCAGCAACTGTTTGTGGACCTAAAAAGTCTACTAATTTGGTTAAAAACAAATGTGTCAATTTCAACTTCAATGGTTTAAC
AGGCACAGGTGTTCTTACTGAGTCTAACAAAAAGTTTCTGCCTTTCCAACAATTTGGCAGAGACATTGCTGACACTACTGA
TGCTGTCCGTGATCCACAGACACTTGAGATTCTTGACATTACACCATGTTCTTTTGGTGGTGTCAGTGTTATAACACCAGGA
ACAAATACTTCTAACCAGGTTGCTGTTCTTTATCAGGATGTTAACTGCACAGAAGTCCCTGTTGCTATTCATGCAGATCAAC
TTACTCCTACTTGGCGTGTTTATTCTACAGGTTCTAATGTTTTTCAAACACGTGCAGGCTGTTTAATAGGGGCTGAACATGT
CAACAACTCATATGAGTGTGACATACCCATTGGTGCAGGTATATGCGCTAGTTATCAGACTCAGACTAATTCTCCTCGGCG
GGCACGTAGTGTAGCTAGTCAATCCATCATTGCCTACACTATGTCACTTGGTGCAGAAAATTCAGTTGCTTACTCTAATAAC
TCTATTGCCATACCCACAAATTTTACTATTAGTGTTACCACAGAAATTCTACCAGTGTCTATGACCAAGACATCAGTAGATT
GTACAATGTACATTTGTGGTGATTCAACTGAATGCAGCAATCTTTTGTTGCAATATGGCAGTTTTTGTACACAATTAAACCG
TGCTTTAACTGGAATAGCTGTTGAACAAGACAAAAACACCCAAGAAGTTTTTGCACAAGTCAAACAAATTTACAAAACACC
ACCAATTAAAGATTTTGGTGGTTTTAATTTTTCACAAATATTACCAGATCCATCAAAACCAAGCAAGAGGTCATTTATTGAA
GATCTACTTTTCAACAAAGTGACACTTGCAGATGCTGGCTTCATCAAACAATATGGTGATTGCCTTGGTGATATTGCTGCTA
GAGACCTCATTTGTGCACAAAAGTTTAACGGCCTTACTGTTTTGCCACCTTTGCTCACAGATGAAATGATTGCTCAATACAC
TTCTGCACTGTTAGCGGGTACAATCACTTCTGGTTGGACCTTTGGTGCAGGTGCTGCATTACAAATACCATTTGCTATGCA
AATGGCTTATAGGTTTAATGGTATTGGAGTTACACAGAATGTTCTCTATGAGAACCAAAAATTGATTGCCAACCAATTTAA
TAGTGCTATTGGCAAAATTCAAGACTCACTTTCTTCCACAGCAAGTGCACTTGGAAAACTTCAAGATGTGGTCAACCAAAA
TGCACAAGCTTTAAACACGCTTGTTAAACAACTTAGCTCCAATTTTGGTGCAATTTCAAGTGTTTTAAATGATATCCTTTCAC
GTCTTGACAAAGTTGAGGCTGAAGTGCAAATTGATAGGTTGATCACAGGCAGACTTCAAAGTTTGCAGACATATGTGACT
CAACAATTAATTAGAGCTGCAGAAATCAGAGCTTCTGCTAATCTTGCTGCTACTAAAATGTCAGAGTGTGTACTTGGACAA
TCAAAAAGAGTTGATTTTTGTGGAAAGGGCTATCATCTTATGTCCTTCCCTCAGTCAGCACCTCATGGTGTAGTCTTCTTGC
ATGTGACTTATGTCCCTGCACAAGAAAAGAACTTCACAACTGCTCCTGCCATTTGTCATGATGGAAAAGCACACTTTCCTC
GTGAAGGTGTCTTTGTTTCAAATGGCACACACTGGTTTGTAACACAAAGGAATTTTTATGAACCACAAATCATTACTACAG
ACAACACATTTGTGTCTGGTAACTGTGATGTTGTAATAGGAATTGTCAACAACACAGTTTATGATCCTTTGCAACCTGAATT
AGACTCATTCAAGGAGGAGTTAGATAAATATTTTAAGAATCATACATCACCAGATGTTGATTTAGGTGACATCTCTGGCAT
TAATGCTTCAGTTGTAAACATTCAAAAAGAAATTGACCGCCTCAATGAGGTTGCCAAGAATTTAAATGAATCTCTCATCGA
TCTCCAAGAACTTGGAAAGTATGAGCAGTATATAAAATGGCCATGGTACATTTGGCTAGGTTTTATAGCTGGCTTGATTGC
CATAGTAATGGTGACAATTATGCTTTGCTGTATGACCAGTTGCTGTAGTTGTCTCÅAGGGCTGTTGTTCTTGTGGATCCTGC
TGCAAATTTGATGAAGACGACTCTGAGCCAGTGCTCAAAGGAGTCAAATTACATTACACATAAACGAACTTATGGATTTGT
TTATGAGAATCTTCACAATTGGAACTGTAACTTTGAAGCAAGGTGAAATCAAGGATGCTACTCCTTCAGATTTTGTTCGCG
CTACTGCAACGATACCGATACAAGCCTCACTCCCTTTCGGATGGCTTATTGTTGGCGTTGCACTTCTTGCTGTTTTTCAGAG
CGCTTCCAAAATCATAACCCTCAAAAAGAGATGGCAACTAGCACTCTCCAAGGGTGTTCACTTTGTTTGCAACTTGCTGTT
GTTGTTTGTAACAGTTTACTCACACCTTTTGCTCGTTGCTGCTGGCCTTGAAGCCCCTTTTCTCTATCTTTATGCTTTAGTCTA
CTTCTTGCAGAGTATAAACTTTGTAAGAATAATAATGAGGCTTTGGCTTTGCTGGAAATGCCGTTCCAAAAACCCATTACTT
TATGATGCCAACTATTTTCTTTGCTGGCATACTAATTGTTACGACTATTGTATACCTTACAATAGTGTAACTTCTTCAATTGT
CATTACTTCAGGTGATGGCACAACAAGTCCTATTTCTGAACATGACTACCAGATTGGTGGTTATACTGAAAAATGGGAATC
TGGAGTAAAAGACTGTGTTGTATTACACAGTTACTTCACTTCAGACTATTACCAGCTGTACTCAACTCAATTGAGTACAGAC
ACTGGTGTTGAACATGTTACCTTCTTCATCTACAATAAAATTGTTGATGAGCCTGAAGAACATGTCCAAATTCACACAATCG
ACGGTTCATCCGGAGTTGTTAATCCAGTAATGGAACCAATTTATGATGAACCGACGACGACTACTAGCGTGCCTTTGTAAG
CACAAGCTGATGAGTACGAACTTATGTACTCATTCGTTTCGGAAGAGACAGGTACGTTAATAGTTAATAGCGTACTTCTTT
TTCTTGCTTTCGTGGTATTCTTGCTAGTTACACTAGCCATCCTTACTGCGCTTCGATTGTGTGCGTACTGCTGCAATATTGTT
AACGTGAGTCTTGTAAAACCTTCTTTTTACGTTTACTCTCGTGTTAAAAATCTGAATTCTTCTAGAGTTCCTGATCTTCTGGT
CTAAACGAACTAAATATTATATTAGTTTTTCTGTTTGGAACTTTAATTTTAGCCATGGCAGATTCCAACGGTACTATTACCGT
TGAAGAGCTTAAAAAGCTCCTTGAACAATGGAACCTAGTAATAGGTTTCCTATTCCTTACATGGATTTGTCTTCTACAATTT
GCCTATGCCAACAGGAATAGGTTTTTGTATATAATTAAGTTAATTTTCCTCTGGCTGTTATGGCCAGTAACTTTAGCTTGTT
TTGTGCTTGCTGCTGTTTACAGAATAAATTGGATCACCGGTGGAATTGCTATCGCAATGGCTTGTCTTGTAGGCTTGATGT
GGCTCAGCTACTTCATTGCTTCTTTCAGACTGTTTGCGCGTACGCGTTCCATGTGGTCATTCAATCCAGAAACTAACATTCT
TCTCAACGTGCCACTCCATGGCACTATTCTGACCAGACCGCTTCTAGAAAGTGAACTCGTAATCGGAGCTGTGATCCTTCG
TGGACATCTTCGTATTGCTGGACACCATCTAGGACGCTGTGACATCAAGGACCTGCCTAAAGAAATCACTGTTGCTACATC
ACGAACGCTTTCTTATTACAAATTGGGAGCTTCGCAGCGTGTAGCAGGTGACTCAGGTTTTGCTGCATACAGTCGCTACAG
GATTGGCAACTATAAATTAAACACAGACCATTCCAGTAGCAGTGACAATATTGCTTTGCTTGTACAGTAAGTGACAACAGA
TGTTTCATCTCGTTGACTTTCAGGTTACTATAGCAGAGATATTACTAATTATTATGAGGACTTTTAAAGTTTCCATTTGGAAT
CTTGATTACATCATAAACCTCATAATTAAAAATTTATCTAAGTCACTAACTGAGAATAAATATTCTCAATTAGATGAAGAGC
AACCAATGGAGATTGATTAAACGAACATGAAAATTATTCTTTTCTTGGCACTGATAACACTCGCTACTTGTGAGCTTTATCA
CTACCAAGAGTGTGTTAGAGGTACAACAGTACTTTTAAAAGAACCTTGCTCTTCTGGAACATACGAGGGCAATTCACCATT
TCATCCTCTAGCTGATAACAAATTTGCACTGACTTGCTTTAGCACTCAATTTGCTTTTGCTTGTCCTGACGGCGTAAAACAC
GTCTATCAGTTACGTGCCAGATCAGTTTCACCTAAACTGTTCATCAGACAAGAGGAAGTTCAAGAACTTTACTCTCCAATTT
TTCTTATTGTTGCGGCAATAGTGTTTATAACACTTTGCTTCACACTCAAAAGAAAGACAGAATGATTGAACTTTCATTAATT
GACTTCTATTTGTGCTTTTTAGCCTTTCTGCTATTCCTTGTTTTAATTATGCTTATTATCTTTTGGTTCTCACTTGAACTGCAA
GATCATAATGAAACTTGTCACGCCTAAACGAACATGAAATTTCTTGTTTTCTTAGGAATCATCACAACTGTAGCTGCATTTC
ACCAAGAATGTAGTTTACAGTCATGTACTCAACATCAACCATATGTAGTTGATGACCCGTGTCCTATTCACTTCTATTCTAA
ATGGTATATTAGAGTAGGAGCTAGAAAATCAGCACCTTTAATTGAATTGTGCGTGGATGAGGCTGGTTCTAAATCACCCA
TTCAGTACATCGATATCGGTAATTATACAGTTTCCTGTTTACCTTTTACAATTAATTGCCAGGAACCTAAATTGGGTAGTCTT
GTAGTGCGTTGTTCGTTCTATGAAGACTTTTTAGAGTATCATGACGTTCGTGTTGTTTTAGATTTCATCTAAACGAACAAAC
TAAAATGTCTGATAATGGACCCCAAAATCAGCGAAATGCACCCCGCATTACGTTTGGTGGACCCTCAGATTCAACTGGCA
GTAACCAGAATGGAGAACGCAGTGGGGCGCGATCAAAACAACGTCGGCCCCAAGGTTTACCCAATAATACTGCGTCTTG
GTTCACCGCTCTCACTCAACATGGCAAGGAAGACCTTAAATTCCCTCGAGGACAAGGCGTTCCAATTAACACCAATAGCAG
TCCAGATGACCAAATTGGCTACTACCGAAGAGCTACCAGACGAATTCGTGGTGGTGACGGTAAAATGAAAGATCTCAGTC
CAAGATGGTATTTCTACTACCTAGGAACTGGGCCAGAAGCTGGACTTCCCTATGGTGCTAACAAAGACGGCATCATATGG
GTTGCAACTGAGGGAGCCTTGAATACACCAAAAGATCACATTGGCACCCGCAATCCTGCTAACAATGCTGCAATCGTGCT
ACAACTTCCTCAAGGAACAACATTGCCAAAAGGCTTCTACGCAGAAGGGAGCAGAGGCGGCAGTCAAGCCTCTTCTCGTT
CCTCATCACGTAGTCGCAACAGTTCAAGAAATTCAACTCCAGGCAGCAGTAGGGGAACTTCTCCTGCTAGAATGGCTGGC
AATGGCGGTGATGCTGCTCTTGCTTTGCTGCTGCTTGACAGATTGAACCAGCTTGAGAGCAAAATGTCTGGTAAAGGCCA
ACAACAACAAGGCCAAACTGTCACTAAGAAATCTGCTGCTGAGGCTTCTAAGAAGCCTCGGCAAAAACGTACTGCCACTA
AAGCATACAATGTAACACAAGCTTTCGGCAGACGTGGTCCAGAACAAACCCAAGGAAATTTTGGGGACCAGGAACTAATC
AGACAAGGAACTGATTACAAACATTGGCCGCAAATTGCACAATTTGCCCCCAGCGCTTCAGCGTTCTTCGGAATGTCGCGC
ATTGGCATGGAAGTCACACCTTCGGGAACGTGGTTGACCTACACAGGTGCCATCAAATTGGATGACAAAGATCCAAATTT
CAAAGATCAAGTCATTTTGCTGAATAAGCATATTGACGCATACAAAACATTCCCACCAACAGAGCCTAAAAAGGACAAAA
AGAAGAAGGCTGATGAAACTCAAGCCTTACCGCAGAGACAGAAGAAACAGCAAACTGTGACTCTTCTTCCTGCTGCAGAT
TTGGATGATTTCTCCAAACAATTGCAACAATCCATGAGCAGTGCTGACTCAACTCAGGCCTAAACTCATGCAGACCACACA
AGGCAGATGGGCTATATAAACGTTTTCGCTTTTCCGTTTACGATATATAGTCTACTCTTGTGCAGAATGAATTCTCGTAACT
ACATAGCACAAGTAGATGTAGTTAACTTTAATCTCACATAGCAATCTTTAATCAGTGTGTAACATTAGGGAGGACTTGAAA
GAGCCACCACATTTTCACCGAGGCCACGCGGAGTACGATCGAGTGTACAGTGAACAATGCTAGGGAGAGCTGCCTATAT
GGAAGAGCCCTAATGTGTAAAATTAATTTTAGTAGTGCTATCCCCATGTGATTTTAATAGCTTCTTAGGAGAATGACAAAA
AAAAAAAAAAAAAAAAAAAAAAAAAAAAA
SEQ ID NO: 2
Severe acute respiratory syndrome coronavirus 2 orf1ab polyprotein of isolate Wuhan-Hu-1 (GenBank:
QHD43415)
MESLVPGFNEKTHVQLSLPVLQVRDVLVRGFGDSVEEVLSEARQHLKDGTCGLVEVEKGVLPQLEQPYVFIKRSDARTAPHGH
VMVELVAELEGIQYGRSGETLGVLVPHVGEIPVAYRKVLLRKNGNKGAGGHSYGADLKSFDLGDELGTDPYEDFQENWNTKH
SSGVTRELMRELNGGAYTRYVDNNFCGPDGYPLECIKDLLARAGKASCTLSEQLDFIDTKRGVYCCREHEHEIAWYTERSEKSYE
LQTPFEIKLAKKFDTFNGECPNFVFPLNSIIKTIQPRVEKKKLDGFMGRIRSVYPVASPNECNQMCLSTLMKCDHCGETSWQTG
DFVKATCEFCGTENLTKEGATTCGYLPQNAVVKIYCPACHNSEVGPEHSLAEYHNESGLKTILRKGGRTIAFGGCVFSYVGCHNK
CAYWVPRASANIGCNHTGVVGEGSEGLNDNLLEILQKEKVNINIVGDFKLNEEIAHILASFSASTSAFVETVKGLDYKAFKQIVESC
GNFKVTKGKAKKGAWNIGEQKSILSPLYAFASEAARVVRSIFSRTLETAQNSVRVLQKAAITILDGISQYSLRLIDAMMFTSDLAT
NNLVVMAYITGGVVQLTSQWLTNIFGTVYEKLKPVLDWLEEKFKEGVEFLRDGWEIVKFISTCACEIVGGQIVTCAKEIKESVQT
FFKLVNKFLALCADSIIIGGAKLKALNLGETFVTHSKGLYRKCVKSREETGLLMPLKAPKEIIFLEGETLPTEVLTEEVVLKTGDLQPL
EQPTSEAVEAPLVGTPVCINGLMLLEIKDTEKYCALAPNMMVTNNTFTLKGGAPTKVTFGDDTVIEVQGYKSVNITFELDERIDK
VLNEKCSAYTVELGTEVNEFACVVADAVIKTLQPVSELLTPLGIDLDEWSMATYYLFDESGEFKLASHMYCSFYPPDEDEEEGDC
EEEEFEPSTQYEYGTEDDYQGKPLEFGATSAALQPEEEQEEDWLDDDSQQTVGQQDGSEDNQTTTIQTIVEVQPQLEMELTP
VVQTIEVNSFSGYLKLTDNVYIKNADIVEEAKKVKPTVVVNAANVYLKHGGGVAGALNKATNNAMQVESDDYIATNGPLKVG
GSCVLSGHNLAKHCLHVVGPNVNKGEDIQLLKSAYENFNQHEVLLAPLLSAGIFGADPIHSLRVCVDTVRTNVYLAVFDKNLYD
KLVSSFLEMKSEKQVEQKIAEIPKEEVKPFITESKPSVEQRKQDDKKIKACVEEVTTTLEETKFLTENLLLYIDINGNLHPDSATLVSD
IDITFLKKDAPYIVGDVVQEGVLTAVVIPTKKAGGTTEMLAKALRKVPTDNYITTYPGQGLNGYTVEEAKTVLKKCKSAFYILPSIIS
NEKQEILGTVSWNLREMLAHAEETRKLMPVCVETKAIVSTIQRKYKGIKIQEGVVDYGARFYFYTSKTTVASLINTLNDLNETLVT
MPLGYVTHGLNLEEAARYMRSLKVPATVSVSSPDAVTAYNGYLTSSSKTPEEHFIETISLAGSYKDWSYSGQSTQLGIEFLKRGD
KSVYYTSNPTTFHLDGEVITFDNLKTLLSLREVRTIKVFTTVDNINLHTQWVDMSMTYGQQFGPTYLDGADVTKIKPHNSHEGKT
FYVLPNDDTLRVEAFEYYHTTDPSFLGRYMSALNHTKKWKYPQVNGLTSIKWADNNCYLATALLTLQQIELKFNPPALQDAYYR
ARAGEAANFCALILAYCNKTVGELGDVRETMSYLFQHANLDSCKRVLNVVCKTCGQQQTTLKGVEAVMYMGTLSYEQFKKGV
QIPCTCGKQATKYLVQQESPFVMMSAPPAQYELKHGTFTCASEYTGNYQCGHYKHITSKETLYCIDGALLTKSSEYKGPITDVFY
KENSYTTTIKPVTYKLDGVVCTEIDPKLDNYYKKDNSYFTEQPIDLVPNQPYPNASFDNFKFVCDNIKFADDLNQLTGYKKPASRE
LKVTFFPDLNGDVVAIDYKHYTPSFKKGAKLLHKPIVWHVNNATNKATYKPNTWCIRCLWSTKPVETSNSFDVLKSEDAQGMD
NLACEDLKPVSEEVVENPTIQKDVLECNVKTTEVVGDIILKPANNSLKITEEVGHTDLMAAYVDNSSLTIKKPNELSRVLGLKTLAT
HGLAAVNSVPWDTIANYAKPFLNKVVSTTTNIVTRCLNRVCTNYMPYFFTLLLQLCTFTRSTNSRIKASMPTTIAKNTVKSVGKF
CLEASFNYLKSPNFSKLINIIIWFLLLSVCLGSLIYSTAALGVLMSNLGMPSYCTGYREGYLNSTNVTIATYCTGSIPCSVCLSGLDSL
DTYPSLETIQITISSFKWDLTAFGLVAEWFLAYILFTRFFYVLGLAAIMQLFFSYFAVHFISNSWLMWLIINLVQMAPISAMVRMY
IFFASFYYVWKSYVHVVDGCNSSTCMMCYKRNRATRVECTTIVNGVRRSFYVYANGGKGFCKLHNWNCVNCDTFCAGSTFIS
DEVARDLSLQFKRPINPTDQSSYIVDSVTVKNGSIHLYFDKAGQKTYERHSLSHFVNLDNLRANNTKGSLPINVIVFDGKSKCEES
SAKSASVYYSQLMCQPILLLDQALVSDVGDSAEVAVKMFDAYVNTFSSTENVPMEKLKTLVATAEAELAKNVSLDNVLSTFISAA
RQGFVDSDVETKDVVECLKLSHQSDIEVTGDSCNNYMLTYNKVENMTPRDLGACIDCSARHINAQVAKSHNIALIWNVKDFM
SLSEQLRKQIRSAAKKNNLPFKLTCATTRQVVNVVTTKIALKGGKIVNNWLKQLIKVTLVFLFVAAIFYLITPVHVMSKHTDFSSEII
GYKAIDGGVTRDIASTDTCFANKHADFDTWFSQRGGSYTNDKACPLIAAVITREVGFVVPGLPGTILRTTNGDFLHFLPRVFSAV
GNICYTPSKLIEYTDFATSACVLAAECTIFKDASGKPVPYCYDTNVLEGSVAYESLRPDTRYVLMDGSIIQFPNTYLEGSVRVVTTF
DSEYCRHGTCERSEAGVCVSTSGRWVLNNDYYRSLPGVFCGVDAVNLLTNMFTPLIQPIGALDISASIVAGGIVAIVVTCLAYYF
MRFRRAFGEYSHVVAFNTLLFLMSFTVLCLTPVYSFLPGVYSVIYLYLTFYLTNDVSFLAHIQWMVMFTPLVPFWITIAYIICISTK
HFYWFFSNYLKRRVVFNGVSFSTFEEAALCTFLLNKEMYLKLRSDVLLPLTQYNRYLALYNKYKYFSGAMDTTSYREAACCHLAK
ALNDFSNSGSDVLYQPPQTSITSAVLQSGFRKMAFPSGKVEGCMVQVTCGTTTINGLWLDDVVYCPRHVICTSEDMLNPNYE
DLLIRKSNHNFLVQAGNVQLRVIGHSMQNCVLKLKVDTANPKTPKYKFVRIQPGQTFSVLACYNGSPSGVYQCAMRPNFTIKG
SFLNGSCGSVGFNIDYDCVSFCYMHHMELPTGVHAGTDLEGNFYGPFVDRQTAQAAGTDTTITVNVLAWLYAAVINGDRWF
LNRFTTTLNDFNLVAMKYNYEPLTQDHVDILGPLSAQTGIAVLDMCASLKELLQNGMNGRTILGSALLEDEFTPFDVVRQCSGV
TFQSAVKRTIKGTHHWLLLTILTSLLVLVQSTQWSLFFFLYENAFLPFAMGHIAMSAFAMMFVKHKHAFLCLFLLPSLATVAYFN
MVYMPASWVMRIMTWLDMVDTSLSGFKLKDCVMYASAVVLLILMTARTVYDDGARRVWTLMNVLTLVYKVYYGNALDQA
ISMWALIISVTSNYSGVVTTVMFLARGIVFMCVEYCPIFFITGNTLQCIMLVYCFLGYFCTCYFGLFCLLNRYFRLTLGVYDYLVST
QEFRYMNSQGLLPPKNSIDAFKLNIKLLGVGGKPCIKVATVQSKMSDVKCTSVVLLSVLQQLRVESSSKLWAQCVQLHNDILLA
KDTTEAFEKMVSLLSVLLSMQGAVDINKLCEEMLDNRATLQAIASEFSSLPSYAAFATAQEAYEQAVANGDSEVVLKKLKKSLN
VAKSEFDRDAAMQRKLEKMADQAMTQMYKQARSEDKRAKVTSAMQTMLFTMLRKLDNDALNNIINNARDGCVPLNIIPLT
TAAKLMVVIPDYNTYKNTCDGTTFTYASALWEIQQVVDADSKIVQLSEISMDNSPNLAWPLIVTALRANSAVKLQNNELSPVAL
RQMSCAAGTTQTACTDDNALAYYNTTKGGRFVLALLSDLQDLKWARFPKSDGTGTIYTELEPPCRFVTDTPKGPKVKYLYFIKG
LNNLNRGMVLGSLAATVRLQAGNATEVPANSTVLSFCAFAVDAAKAYKDYLASGGQPITNCVKMLCTHTGTGQAITVTPEAN
MDQESFGGASCCLYCRCHIDHPNPKGFCDLKGKYVQIPTTCANDPVGFTLKNTVCTVCGMWKGYGCSCDQLREPMLQSADA
QSFLNRVCGVSAARLTPCGTGTSTDVVYRAFDIYNDKVAGFAKFLKTNCCRFQEKDEDDNLIDSYFVVKRHTFSNYQHEETIYNL
LKDCPAVAKHDFFKFRIDGDMVPHISRQRLTKYTMADLVYALRHFDEGNCDTLKEILVTYNCCDDDYFNKKDWYDFVENPDIL
RVYANLGERVRQALLKTVQFCDAMRNAGIVGVLTLDNQDLNGNWYDFGDFIQTTPGSGVPVVDSYYSLLMPILTLTRALTAES
HVDTDLTKPYIKWDLLKYDFTEERLKLFDRYFKYWDQTYHPNCVNCLDDRCILHCANFNVLFSTVFPPTSFGPLVRKIFVDGVPF
VVSTGYHFRELGVVHNQDVNLHSSRLSFKELLVYAADPAMHAASGNLLLDKRTTCFSVAALTNNVAFQTVKPGNFNKDFYDFA
VSKGFFKEGSSVELKHFFFAQDGNAAISDYDYYRYNLPTMCDIRQLLFVVEVVDKYFDCYDGGCINANQVIVNNLDKSAGFPFN
KWGKARLYYDSMSYEDQDALFAYTKRNVIPTITQMNLKYAISAKNRARTVAGVSICSTMTNRQFHQKLLKSIAATRGATVVIGT
SKFYGGWHNMLKTVYSDVENPHLMGWDYPKCDRAMPNMLRIMASLVLARKHTTCCSLSHRFYRLANECAQVLSEMVMCG
GSLYVKPGGTSSGDATTAYANSVFNICQAVTANVNALLSTDGNKIADKYVRNLQHRLYECLYRNRDVDTDFVNEFYAYLRKHFS
MMILSDDAVVCFNSTYASQGLVASIKNFKSVLYYQNNVFMSEAKCWTETDLTKGPHEFCSQHTMLVKQGQDYVYLPYPQPSRI
LGAGCFVDDIVKTDGTLMIERFVSLAIDAYPLTKHPNQEYADVFHLYLQYIRKLHDELTGHMLDMYSVMLTNDNTSRYWEPEF
YEAMYTPHTVLQAVGACVLCNSQTSLRCGACIRRPFLCCKCCYDHVISTSHKLVLSVNPYVCNAPGCDVTDVTQLYLGGMSYYC
KSHKPPISFPLCANGQVFGLYKNTCVGSDNVTDFNAIATCDWTNAGDYILANTCTERLKLFAAETLKATEETFKLSYGIATVREVL
SDRELHLSWEVGKPRPPLNRNYVFTGYRVTKNSKVQIGEYTFEKGDYGDAVVYRGTTTYKLNVGDYFVLTSHTVMPLSAPTLVP
QEHYVRITGLYPTLNISDEFSSNVANYQKVGMQKYSTLQGPPGTGKSHFAIGLALYYPSARIVYTACSHAAVDALCEKALKYLPID
KCSRIIPARARVECFDKFKVNSTLEQYVFCTVNALPETTADIVVFDEISMATNYDLSVVNARLRAKHYVYIGDPAQLPAPRTLLTK
GTLEPEYFNSVCRLMKTIGPDMFLGTCRRCPAEIVDTVSALVYDNKLKAHKDKSAQCFKMFYKGVITHDVSSAINRPQIGVVREF
LTRNPAWRKAVFISPYNSQNAVASKILGLPTQTVDSSQGSEYDYVIFTQTTETAHSCNVNRFNVAITRAKVGILCIMSDRDLYDK
LQFTSLEIPRRNVATLQAENVTGLFKDCSKVITGLHPTQAPTHLSVDTKFKTEGLCVDIPGIPKDMTYRRLISMMGFKMNYQVN
GYPNMFITREEAIRHVRAWIGFDVEGCHATREAVGTNLPLQLGFSTGVNLVAVPTGYVDTPNNTDFSRVSAKPPPGDQFKHLI
PLMYKGLPWNVVRIKIVQMLSDTLKNLSDRVVFVLWAHGFELTSMKYFVKIGPERTQCLCDRRATCESTASDTYACWHHSIGF
DYVYNPFMIDVQQWGFTGNLQSNHDLYCQVHGNAHVASCDAIMTRCLAVHECFVKRVDWTIEYPIIGDELKINAACRKVQH
MVVKAALLADKFPVLHDIGNPKAIKCVPQADVEWKFYDAQPCSDKAYKIEELFYSYATHSDKFTDGVCLFWNCNVDRYPANSI
VCRFDTRVLSNLNLPGCDGGSLYVNKHAFHTPAFDKSAFVNLKQLPFFYYSDSPCESHGKQVVSDIDYVPLKSATCITRQNLGGA
VCRHHANEYRLYLDAYNMMISAGFSLWVYKQFDTYNLWNTFTRLQSLENVAFNVVNKGHFDGQQGEVPVSIINNTVYTKVD
GVDVELFENKTTLPVNVAFELWAKRNIKPVPEVKILNNLGVDIAANTVIWDYKRDAPAHISTIGVCSMTDIAKKPTETICAPLTVF
FDGRVDGQVDLFRNARNGVLITEGSVKGLQPSVGPKQASLNGVTLIGEAVKTQFNYYKKVDGVVQQLPETYFTQSRNLQEFKP
RSQMEIDFLELAMDEFIERYKLEGYAFEHIVYGDFSHSQLGGLHLLIGLAKRFKESPFELEDFIPMDSTVKNYFITDAQTGSSKCVC
SVIDLLLDDFVEIIKSQDLSVVSKVVKVTIDYTEISFMLWCKDGHVETFYPKLQSSQAWQPGVAMPNLYKMQRMLLEKCDLQN
YGDSATLPKGIMMNVAKYTQLCQYLNTLTLAVPYNMRVIHFGAGSDKGVAPGTAVLRQWLPTGTLLVDSDLNDFVSDADSTLI
GDCATVHTANKWDLIISDMYDPKTKNVTKENDSKEGFFTYICGFIQQKLALGGSVAIKITEHSWNADLYKLMGHFAWWTAFV
TNVNASSSEAFLIGCNYLGKPREQIDGYVMHANYIFWRNTNPIQLSSYSLFDMSKFPLKLRGTAVMSLKEGQINDMILSLLSKGR
LIIRENNRVVISSDVLVNN
SEQ ID NO: 3
Severe acute respiratory syndrome coronavirus 2 surface glycoprotein (GenBank: QHD43416)
MFVFLVLLPLVSSQCVNLTTRTQLPPAYTNSFTRGVYYPDKVFRSSVLHSTQDLFLPFFSNVTWFHAIHVSGTNGTKRFDNPVLP
FNDGVYFASTEKSNIIRGWIFGTTLDSKTQSLLIVNNATNVVIKVCEFQFCNDPFLGVYYHKNNKSWMESEFRVYSSANNCTFEY
VSQPFLMDLEGKQGNFKNLREFVFKNIDGYFKIYSKHTPINLVRDLPQGFSALEPLVDLPIGINITRFQTLLALHRSYLTPGDSSSG
WTAGAAAYYVGYLQPRTFLLKYNENGTITDAVDCALDPLSETKCTLKSFTVEKGIYQTSNFRVQPTESIVRFPNITNLCPFGEVFN
ATRFASVYAWNRKRISNCVADYSVLYNSASFSTFKCYGVSPTKLNDLCFTNVYADSFVIRGDEVRQIAPGQTGKIADYNYKLPDD
FTGCVIAWNSNNLDSKVGGNYNYLYRLFRKSNLKPFERDISTEIYQAGSTPCNGVEGFNCYFPLQSYGFQPTNGVGYQPYRVVV
LSFELLHAPATVCGPKKSTNLVKNKCVNFNFNGLTGTGVLTESNKKFLPFQQFGRDIADTTDAVRDPQTLEILDITPCSFGGVSVI
TPGTNTSNQVAVLYQDVNCTEVPVAIHADQLTPTWRVYSTGSNVFQTRAGCLIGAEHVNNSYECDIPIGAGICASYQTQTNSP
RRARSVASQSIIAYTMSLGAENSVAYSNNSIAIPTNFTISVTTEILPVSMTKTSVDCTMYICGDSTECSNLLLQYGSFCTQLNRALT
GIAVEQDKNTQEVFAQVKQIYKTPPIKDFGGFNFSQILPDPSKPSKRSFIEDLLFNKVTLADAGFIKQYGDCLGDIAARDLICAQKF
NGLTVLPPLLTDEMIAQYTSALLAGTITSGWTFGAGAALQIPFAMQMAYRFNGIGVTQNVLYENQKLIANQFNSAIGKIQDSLS
STASALGKLQDVVNQNAQALNTLVKQLSSNFGAISSVLNDILSRLDKVEAEVQIDRLITGRLQSLQTYVTQQLIRAAEIRASANLA
ATKMSECVLGQSKRVDFCGKGYHLMSFPQSAPHGVVFLHVTYVPAQEKNFTTAPAICHDGKAHFPREGVFVSNGTHWFVTQ
RNFYEPQIITTDNTFVSGNCDVVIGIVNNTVYDPLQPELDSFKEELDKYFKNHTSPDVDLGDISGINASVVNIQKEIDRLNEVAKN
LNESLIDLQELGKYEQYIKWPWYIWLGFIAGLIAIVMVTIMLCCMTSCCSCLKGCCSCGSCCKFDEDDSEPVLKGVKLHYT
SEQ ID NO: 4
CpG 1018
TGACTGTGAACGTTCGAGATGA
SEQ ID NO: 5
KLK peptide
KLKLLLLLKLK
SEQ ID NO: 6
Oligo-d(IC)₁₃ (ODN1a)
ICICICICICICICICICICICICIC
SEQ ID NO: 7
CpG 1826
TCCATGACGTTCCTGACGTT
SEQ ID NO: 8
CpG 7909
TCGTCGTTTTGTCGTTTTGTCGTT
SEQ ID NO: 9
>hCoV-19/Italy/INMI1-isl/2020|EPI_ISL 410545|2020-Jan.-29 (Accession No: MT066156)
ATTAAAGGTTTATACCTTCCCAGGTAACAAACCAACCAACTTTCGATCTCTTGTAGATCTGTTCTCTAAACGAACTTTAAAA
TCTGTGTGGCTGTCACTCGGCTGCATGCTTAGTGCACTCACGCAGTATAATTAATAACTAATTACTGTCGTTGACAGGACA
CGAGTAACTCGTCTATCTTCTGCAGGCTGCTTACGGTTTCGTCCGTGTTGCAGCCGATCATCAGCACATCTAGGTTTCGTCC
GGGTGTGACCGAAAGGTAAGATGGAGAGCCTTGTCCCTGGTTTCAACGAGAAAACACACGTCCAACTCAGTTTGCCTGTT
TTACAGGTTCGCGACGTGCTCGTACGTGGCTTTGGAGACTCCGTGGAGGAGGTCTTATCAGAGGCACGTCAACATCTTAA
AGATGGCACTTGTGGCTTAGTAGAAGTTGAAAAAGGCGTTTTGCCTCAACTTGAACAGCCCTATGTGTTCATCAAACGTTC
GGATGCTCGAACTGCACCTCATGGTCATGTTATGGTTGAGCTGGTAGCAGAACTCGAAGGCATTCAGTACGGTCGTAGTG
GTGAGACACTTGGTGTCCTTGTCCCTCATGTGGGCGAAATACCAGTGGCTTACCGCAAGGTTCTTCTTCGTAAGAACGGTA
ATAAAGGAGCTGGTGGCCATAGTTACGGCGCCGATCTAAAGTCATTTGACTTAGGCGACGAGCTTGGCACTGATCCTTAT
GAAGATTTTCAAGAAAACTGGAACACTAAACATAGCAGTGGTGTTACCCGTGAACTCATGCGTGAGCTTAACGGAGGGG
CATACACTCGCTATGTCGATAACAACTTCTGTGGCCCTGATGGCTACCCTCTTGAGTGCATTAAAGACCTTCTAGCACGTGC
TGGTAAAGCTTCATGCACTTTGTCCGAACAACTGGACTTTATTGACACTAAGAGGGGTGTATACTGCTGCCGTGAACATGA
GCATGAAATTGCTTGGTACACGGAACGTTCTGAAAAGAGCTATGAATTGCAGACACCTTTTGAAATTAAATTGGCAAAGA
AATTTGACACCTTCAATGGGGAATGTCCAAATTTTGTATTTCCCTTAAATTCCATAATCAAGACTATTCAACCAAGGGTTGA
AAAGAAAAAGCTTGATGGCTTTATGGGTAGAATTCGATCTGTCTATCCAGTTGCGTCACCAAATGAATGCAACCAAATGT
GCCTTTCAACTCTCATGAAGTGTGATCATTGTGGTGAAACTTCATGGCAGACGGGCGATTTTGTTAAAGCCACTTGCGAAT
TTTGTGGCACTGAGAATTTGACTAAAGAAGGTGCCACTACTTGTGGTTACTTACCCCAAAATGCTGTTGTTAAAATTTATTG
TCCAGCATGTCACAATTCAGAAGTAGGACCTGAGCATAGTCTTGCCGAATACCATAATGAATCTGGCTTGAAAACCATTCT
TCGTAAGGGTGGTCGCACTATTGCCTTTGGAGGCTGTGTGTTCTCTTATGTTGGTTGCCATAACAAGTGTGCCTATTGGGT
TCCACGTGCTAGCGCTAACATAGGTTGTAACCATACAGGTGTTGTTGGAGAAGGTTCCGAAGGTCTTAATGACAACCTTCT
TGAAATACTCCAAAAAGAGAAAGTCAACATCAATATTGTTGGTGACTTTAAACTTAATGAAGAGATCGCCATTATTTTGGC
ATCTTTTTCTGCTTCCACAAGTGCTTTTGTGGAAACTGTGAAAGGTTTGGATTATAAAGCATTCAAACAAATTGTTGAATCC
TGTGGTAATTTTAAAGTTACAAAAGGAAAAGCTAAAAAAGGTGCCTGGAATATTGGTGAACAGAAATCAATACTGAGTCC
TCTTTATGCATTTGCATCAGAGGCTGCTCGTGTTGTACGATCAATTTTCTCCCGCACTCTTGAAACTGCTCAAAATTCTGTGC
GTGTTTTACAGAAGGCCGCTATAACAATACTAGATGGAATTTCACAGTATTCACTGAGACTCATTGATGCTATGATGTTCA
CATCTGATTTGGCTACTAACAATCTAGTTGTAATGGCCTACATTACAGGTGGTGTTGTTCAGTTGACTTCGCAGTGGCTAA
CTAACATCTTTGGCACTGTTTATGAAAAACTCAAACCCGTCCTTGATTGGCTTGAAGAGAAGTTTAAGGAAGGTGTAGAGT
TTCTTAGAGACGGTTGGGAAATTGTTAAATTTATCTCAACCTGTGCTTGTGAAATTGTCGGTGGACAAATTGTCACCTGTG
CTAAGGAAATTAAGGAGAGTGTTCAGACATTCTTTAAGCTTGTAAATAAATTTTTGGCTTTGTGTGCTGACTCTATCATTAT
TGGTGGAGCTAAACTTAAAGCCTTGAATTTAGGTGAAACATTTGTCACGCACTCAAAGGGATTGTACAGAAAGTGTGTTA
AATCCAGAGAAGAAACTGGCCTACTCATGCCTCTAAAAGCCCCAAAAGAAATTATCTTCTTAGAGGGAGAAACACTTCCCA
CAGAAGTGTTAACAGAGGAAGTTGTCTTGAAAACTGGTGATTTACAACCATTAGAACAACCTACTAGTGAAGCTGTTGAA
GCTCCATTGGTTGGTACACCAGTTTGTATTAACGGGCTTATGTTGCTCGAAATCAAAGACACAGAAAAGTACTGTGCCCTT
GCACCTAATATGATGGTAACAAACAATACCTTCACACTCAAAGGCGGTGCACCAACAAAGGTTACTTTTGGTGATGACACT
GTGATAGAAGTGCAAGGTTACAAGAGTGTGAATATCACTTTTGAACTTGATGAAAGGATTGATAAAGTACTTAATGAGAA
GTGCTCTGCCTATACAGTTGAACTCGGTACAGAAGTAAATGAGTTCGCCTGTGTTGTGGCAGATGCTGTCATAAAAACTTT
GCAACCAGTATCTGAATTACTTACACCACTGGGCATTGATTTAGATGAGTGGAGTATGGCTACATACTACTTATTTGATGA
GTCTGGTGAGTTTAAATTGGCTTCACATATGTATTGTTCTTTCTACCCTCCAGATGAGGATGAAGAAGAAGGTGATTGTGA
AGAAGAAGAGTTTGAGCCATCAACTCAATATGAGTATGGTACTGAAGATGATTACCAAGGTAAACCTTTGGAATTTGGTG
CCACTTCTGCTGCTCTTCAACCTGAAGAAGAGCAAGAAGAAGATTGGTTAGATGATGATAGTCAACAAACTGTTGGTCAA
CAAGACGGCAGTGAGGACAATCAGACAACTACTATTCAAACAATTGTTGAGGTTCAACCTCAATTAGAGATGGAACTTAC
ACCAGTTGTTCAGACTATTGAAGTGAATAGTTTTAGTGGTTATTTAAAACTTACTGACAATGTATACATTAAAAATGCAGA
CATTGTGGAAGAAGCTAAAAAGGTAAAACCAACAGTGGTTGTTAATGCAGCCAATGTTTACCTTAAACATGGAGGAGGT
GTTGCAGGAGCCTTAAATAAGGCTACTAACAATGCCATGCAAGTTGAATCTGATGATTACATAGCTACTAATGGACCACTT
AAAGTGGGTGGTAGTTGTGTTTTAAGCGGACACAATCTTGCTAAACACTGTCTTCATGTTGTCGGCCCAAATGTTAACAAA
GGTGAAGACATTCAACTTCTTAAGAGTGCTTATGAAAATTTTAATCAGCACGAAGTTCTACTTGCACCATTATTATCAGCTG
GTATTTTTGGTGCTGACCCTATACATTCTTTAAGAGTTTGTGTAGATACTGTTCGCACAAATGTCTACTTAGCTGTCTTTGAT
AAAAATCTCTATGACAAACTTGTTTCAAGCTTTTTGGAAATGAAGAGTGAAAAGCAAGTTGAACAAAAGATCGCTGAGAT
TCCTAAAGAGGAAGTTAAGCCATTTATAACTGAAAGTAAACCTTCAGTTGAACAGAGAAAACAAGATGATAAGAAAATCA
AAGCTTGTGTTGAAGAAGTTACAACAACTCTGGAAGAAACTAAGTTCCTCACAGAAAACTTGTTACTTTATATTGACATTA
ATGGCAATCTTCATCCAGATTCTGCCACTCTTGTTAGTGACATTGACATCACTTTCTTAAAGAAAGATGCTCCATATATAGT
GGGTGATGTTGTTCAAGAGGGTGTTTTAACTGCTGTGGTTATACCTACTAAAAAGGCTGGTGGCACTACTGAAATGCTAG
CGAAAGCTTTGAGAAAAGTGCCAACAGACAATTATATAACCACTTACCCGGGTCAGGGTTTAAATGGTTACACTGTAGAG
GAGGCAAAGACAGTGCTTAAAAAGTGTAAAAGTGCCTTTTACATTCTACCATCTATTATCTCTAATGAGAAGCAAGAAATT
CTTGGAACTGTTTCTTGGAATTTGCGAGAAATGCTTGCACATGCAGAAGAAACACGCAAATTAATGCCTGTCTGTGTGGA
AACTAAAGCCATAGTTTCAACTATACAGCGTAAATATAAGGGTATTAAAATACAAGAGGGTGTGGTTGATTATGGTGCTA
GATTTTACTTTTACACCAGTAAAACAACTGTAGCGTCACTTATCAACACACTTAACGATCTAAATGAAACTCTTGTTACAAT
GCCACTTGGCTATGTAACACATGGCTTAAATTTGGAAGAAGCTGCTCGGTATATGAGATCTCTCAAAGTGCCAGCTACAGT
TTCTGTTTCTTCACCTGATGCTGTTACAGCGTATAATGGTTATCTTACTTCTTCTTCTAAAACACCTGAAGAACATTTTATTG
AAACCATCTCACTTGCTGGTTCCTATAAAGATTGGTCCTATTCTGGACAATCTACACAACTAGGTATAGAATTTCTTAAGAG
AGGTGATAAAAGTGTATATTACACTAGTAATCCTACCACATTCCACCTAGATGGTGAAGTTATCACCTTTGACAATCTTAAG
ACACTTCTTTCTTTGAGAGAAGTGAGGACTATTAAGGTGTTTACAACAGTAGACAACATTAACCTCCACACGCAAGTTGTG
GACATGTCAATGACATATGGACAACAGTTTGGTCCAACTTATTTGGATGGAGCTGATGTTACTAAAATAAAACCTCATAAT
TCACATGAAGGTAAAACATTTTATGTTTTACCTAATGATGACACTCTACGTGTTGAGGCTTTTGAGTACTACCACACAACTG
ATCCTAGTTTTCTGGGTAGGTACATGTCAGCATTAAATCACACTAAAAAGTGGAAATACCCACAAGTTAATGGTTTAACTT
CTATTAAATGGGCAGATAACAACTGTTATCTTGCCACTGCATTGTTAACACTCCAACAAATAGAGTTGAAGTTTAATCCACC
TGCTCTACAAGATGCTTATTACAGAGCAAGGGCTGGTGAAGCTGCTAACTTTTGTGCACTTATCTTAGCCTACTGTAATAA
GACAGTAGGTGAGTTAGGTGATGTTAGAGAAACAATGAGTTACTTGTTTCAACATGCCAATTTAGATTCTTGCAAAAGAG
TCTTGAACGTGGTGTGTAAAACTTGTGGACAACAGCAGACAACCCTTAAGGGTGTAGAAGCTGTTATGTACATGGGCACA
CTTTCTTATGAACAATTTAAGAAAGGTGTTCAGATACCTTGTACGTGTGGTAAACAAGCTACAAAATATCTAGTACAACAG
GAGTCACCTTTTGTTATGATGTCAGCACCACCTGCTCAGTATGAACTTAAGCATGGTACATTTACTTGTGCTAGTGAGTACA
CTGGTAATTACCAGTGTGGTCACTATAAACATATAACTTCTAAAGAAACTTTGTATTGCATAGACGGTGCTTTACTTACAAA
GTCCTCAGAATACAAAGGTCCTATTACGGATGTTTTCTACAAAGAAAACAGTTACACAACAACCATAAAACCAGTTACTTA
TAAATTGGATGGTGTTGTTTGTACAGAAATTGACCCTAAGTTGGACAATTATTATAAGAAAGACAATTCTTATTTCACAGA
GCAACCAATTGATCTTGTACCAAACCAACCATATCCAAACGCAAGCTTCGATAATTTTAAGTTTGTATGTGATAATATCAAA
TTTGCTGATGATTTAAACCAGTTAACTGGTTATAAGAAACCTGCTTCAAGAGAGCTTAAAGTTACATTTTTCCCTGACTTAA
ATGGTGATGTGGTGGCTATTGATTATAAACACTACACACCCTCTTTTAAGAAAGGAGCTAAATTGTTACATAAACCTATTG
TTTGGCATGTTAACAATGCAACTAATAAAGCCACGTATAAACCAAATACCTGGTGTATACGTTGTCTTTGGAGCACAAAAC
CAGTTGAAACATCAAATTCGTTTGATGTACTGAAGTCAGAGGACGCGCAGGGAATGGATAATCTTGCCTGCGAAGATCTA
AAACCAGTCTCTGAAGAAGTAGTGGAAAATCCTACCATACAGAAAGACGTTCTTGAGTGTAATGTGAAAACTACCGAAGT
TGTAGGAGACATTATACTTAAACCAGCAAATAATAGTTTAAAAATTACAGAAGAGGTTGGCCACACAGATCTAATGGCTG
CTTATGTAGACAATTCTAGTCTTACTATTAAGAAACCTAATGAATTATCTAGAGTATTAGGTTTGAAAACCCTTGCTACTCA
TGGTTTAGCTGCTGTTAATAGTGTCCCTTGGGATACTATAGCTAATTATGCTAAGCCTTTTCTTAACAAAGTTGTTAGTACA
ACTACTAACATAGTTACACGGTGTTTAAACCGTGTTTGTACTAATTATATGCCTTATTTCTTTACTTTATTGCTACAATTGTG
TACTTTTACTAGAAGTACAAATTCTAGAATTAAAGCATCTATGCCGACTACTATAGCAAAGAATACTGTTAAGAGTGTCGG
TAAATTTTGTCTAGAGGCTTCATTTAATTATTTGAAGTCACCTAATTTTTCTAAACTGATAAATATTATAATTTGGTTTTTACT
ATTAAGTGTTTGCCTAGGTTCTTTAATCTACTCAACCGCTGCTTTAGGTGTTTTAATGTCTAATTTAGGCATGCCTTCTTACT
GTACTGGTTACAGAGAAGGCTATTTGAACTCTACTAATGTCACTATTGCAACCTACTGTACTGGTTCTATACCTTGTAGTGT
TTGTCTTAGTGGTTTAGATTCTTTAGACACCTATCCTTCTTTAGAAACTATACAAATTACCATTTCATCTTTTAAATGGGATTT
AACTGCTTTTGGCTTAGTTGCAGAGTGGTTTTTGGCATATATTCTTTTCACTAGGTTTTTCTATGTACTTGGATTGGCTGCAA
TCATGCAATTGTTTTTCAGCTATTTTGCAGTACATTTTATTAGTAATTCTTGGCTTATGTGGTTAATAATTAATCTTGTACAA
ATGGCCCCGATTTCAGCTATGGTTAGAATGTACATCTTCTTTGCATCATTTTATTATGTATGGAAAAGTTATGTGCATGTTG
TAGACGGTTGTAATTCATCAACTTGTATGATGTGTTACAAACGTAATAGAGCAACAAGAGTCGAATGTACAACTATTGTTA
ATGGTGTTAGAAGGTCCTTTTATGTCTATGCTAATGGAGGTAAAGGCTTTTGCAAACTACACAATTGGAATTGTGTTAATT
GTGATACATTCTGTGCTGGTAGTACATTTATTAGTGATGAAGTTGCGAGAGACTTGTCACTACAGTTTAAAAGACCAATAA
ATCCTACTGACCAGTCTTCTTACATCGTTGATAGTGTTACAGTGAAGAATGGTTCCATCCATCTTTACTTTGATAAAGCTGG
TCAAAAGACTTATGAAAGACATTCTCTCTCTCATTTTGTTAACTTAGACAACCTGAGAGCTAATAACACTAAAGGTTCATTG
CCTATTAATGTTATAGTTTTTGATGGTAAATCAAAATGTGAAGAATCATCTGCAAAATCAGCGTCTGTTTACTACAGTCAGC
TTATGTGTCAACCTATACTGTTACTAGATCAGGCATTAGTGTCTGATGTTGGTGATAGTGCGGAAGTTGCAGTTAAAATGT
TTGATGCTTACGTTAATACGTTTTCATCAACTTTTAACGTACCAATGGAAAAACTCAAAACACTAGTTGCAACTGCAGAAGC
TGAACTTGCAAAGAATGTGTCCTTAGACAATGTCTTATCTACTTTTATTTCAGCAGCTCGGCAAGGGTTTGTTGATTCAGAT
GTAGAAACTAAAGATGTTGTTGAATGTCTTAAATTGTCACATCAATCTGACATAGAAGTTACTGGCGATAGTTGTAATAAC
TATATGCTCACCTATAACAAAGTTGAAAACATGACACCCCGTGACCTTGGTGCTTGTATTGACTGTAGTGCGCGTCATATT
AATGCGCAGGTAGCAAAAAGTCACAACATTGCTTTGATATGGAACGTTAAAGATTTCATGTCATTGTCTGAACAACTACGA
AAACAAATACGTAGTGCTGCTAAAAAGAATAACTTACCTTTTAAGTTGACATGTGCAACTACTAGACAAGTTGTTAATGTT
GTAACAACAAAGATAGCACTTAAGGGTGGTAAAATTGTTAATAATTGGTTGAAGCAGTTAATTAAAGTTACACTTGTGTTC
CTTTTTGTTGCTGCTATTTTCTATTTAATAACACCTGTTCATGTCATGTCTAAACATACTGACTTTTCAAGTGAAATCATAGG
ATACAAGGCTATTGATGGTGGTGTCACTCGTGACATAGCATCTACAGATACTTGTTTTGCTAACAAACATGCTGATTTTGA
CACATGGTTTAGCCAGCGTGGTGGTAGTTATACTAATGACAAAGCTTGCCCATTGATTGCTGCAGTCATAACAAGAGAAG
TGGGTTTTGTCGTGCCTGGTTTGCCTGGCACGATATTACGCACAACTAATGGTGACTTTTTGCATTTCTTACCTAGAGTTTT
TAGTGCAGTTGGTAACATCTGTTACACACCATCAAAACTTATAGAGTACACTGACTTTGCAACATCAGCTTGTGTTTTGGCT
GCTGAATGTACAATTTTTAAAGATGCTTCTGGTAAGCCAGTACCATATTGTTATGATACCAATGTACTAGAAGGTTCTGTTG
CTTATGAAAGTTTACGCCCTGACACACGTTATGTGCTCATGGATGGCTCTATTATTCAATTTCCTAACACCTACCTTGAAGG
TTCTGTTAGAGTGGTAACAACTTTTGATTCTGAGTACTGTAGGCACGGCACTTGTGAAAGATCAGAAGCTGGTGTTTGTGT
ATCTACTAGTGGTAGATGGGTACTTAACAATGATTATTACAGATCTTTACCAGGAGTTTTCTGTGGTGTAGATGCTGTAAA
TTTACTTACTAATATGTTTACACCACTAATTCAACCTATTGGTGCTTTGGACATATCAGCATCTATAGTAGCTGGTGGTATT
GTAGCTATCGTAGTAACATGCCTTGCCTACTATTTTATGAGGTTTAGAAGAGCTTTTGGTGAATACAGTCATGTAGTTGCCT
TTAATACTTTACTATTCCTTATGTCATTCACTGTACTCTGTTTAACACCAGTTTACTCATTCTTACCTGGTGTTTATTCTGTTAT
TTACTTGTACTTGACATTTTATCTTACTAATGATGTTTCTTTTTTAGCACATATTCAGTGGATGGTTATGTTCACACCTTTAGT
ACCTTTCTGGATAACAATTGCTTATATCATTTGTATTTCCACAAAGCATTTCTATTGGTTCTTTAGTAATTACCTAAAGAGAC
GTGTAGTCTTTAATGGTGTTTCCTTTAGTACTTTTGAAGAAGCTGCGCTGTGCACCTTTTTGTTAAATAAAGAAATGTATCT
AAAGTTGCGTAGTGATGTGCTATTACCTCTTACGCAATATAATAGATACTTAGCTCTTTATAATAAGTACAAGTATTTTAGT
GGAGCAATGGATACAACTAGCTACAGAGAAGCTGCTTGTTGTCATCTCGCAAAGGCTCTCAATGACTTCAGTAACTCAGG
TTCTGATGTTCTTTACCAACCACCACAAACCTCTATCACCTCAGCTGTTTTGCAGAGTGGTTTTAGAAAAATGGCATTCCCA
TCTGGTAAAGTTGAGGGTTGTATGGTACAAGTAACTTGTGGTACAACTACACTTAACGGTCTTTGGCTTGATGACGTAGTT
TACTGTCCAAGACATGTGATCTGCACCTCTGAAGACATGCTTAACCCTAATTATGAAGATTTACTCATTCGTAAGTCTAATC
ATAATTTCTTGGTACAGGCTGGTAATGTTCAACTCAGGGTTATTGGACATTCTATGCAAAATTGTGTACTTAAGCTTAAGG
TTGATACAGCCAATCCTAAGACACCTAAGTATAAGTTTGTTCGCATTCAACCAGGACAGACTTTTTCAGTGTTAGCTTGTTA
CAATGGTTCACCATCTGGTGTTTACCAATGTGCTATGAGGCCCAATTTCACTATTAAGGGTTCATTCCTTAATGGTTCATGT
GGTAGTGTTGGTTTTAACATAGATTATGACTGTGTCTCTTTTTGTTACATGCACCATATGGAATTACCAACTGGAGTTCATG
CTGGCACAGACTTAGAAGGTAACTTTTATGGACCTTTTGTTGACAGGCAAACAGCACAAGCAGCTGGTACGGACACAACT
ATTACAGTTAATGTTTTAGCTTGGTTGTACGCTGCTGTTATAAATGGAGACAGGTGGTTTCTCAATCGATTTACCACAACTC
TTAATGACTTTAACCTTGTGGCTATGAAGTACAATTATGAACCTCTAACACAAGACCATGTTGACATACTAGGACCTCTTTC
TGCTCAAACTGGAATTGCCGTTTTAGATATGTGTGCTTCATTAAAAGAATTACTGCAAAATGGTATGAATGGACGTACCAT
ATTGGGTAGTGCTTTATTAGAAGATGAATTTACACCTTTTGATGTTGTTAGACAATGCTCAGGTGTTACTTTCCAAAGTGCA
GTGAAAAGAACAATCAAGGGTACACACCACTGGTTGTTACTCACAATTTTGACTTCACTTTTAGTTTTAGTCCAGAGTACTC
AATGGTCTTTGTTCTTTTTTTTNTATGAAAATGCCTTTTTACCTTTTGCTATGGGTATTATTGCTATGTCTGCTTTTGCAATGA
TGTTTGTCAAACATAAGCATGCATTTCTCTGTTTGTTTTTGTTACCTTCTCTTGCCACTGTAGCTTATTTTAATATGGTCTATA
TGCCTGCTAGTTGGGTGATGCGTATTATGACATGGTTGGATATGGTTGATACTAGTTTGTCTGGTTTTAAGCTAAAAGACT
GTGTTATGTATGCATCAGCTGTAGTGTTACTAATCCTTATGACAGCAAGAACTGTGTATGATGATGGTGCTAGGAGAGTG
TGGACACTTATGAATGTCTTGACACTCGTTTATAAAGTTTATTATGGTAATGCTTTAGATCAAGCCATTTCCATGTGGGCTC
TTATAATCTCTGTTACTTCTAACTACTCAGGTGTAGTTACAACTGTCÅTGTTTTTGGCCAGAGGTATTGTTTTTATGTGTGTT
GAGTATTGCCCTATTTTCTTCATAACTGGTAATACACTTCAGTGTATAATGCTAGTTTATTGTTTCTTAGGCTATTTTTGTACT
TGTTACTTTGGCCTCTTTTGTTTACTCAACCGCTACTTTAGACTGACTCTTGGTGTTTATGATTACTTAGTTTCTACACAGGA
GTTTAGATATATGAATTCACAGGGACTACTCCCACCCAAGAATAGCATAGATGCCTTCAAACTCAACATTAAATTGTTGGG
TGTTGGTGGCAAACCTTGTATCAAAGTAGCCACTGTACAGTCTAAAATGTCAGATGTAAAGTGCACATCAGTAGTCTTACT
CTCAGTTTTGCAACAACTCAGAGTAGAATCATCATCTAAATTGTGGGCTCAATGTGTCCAGTTACACAATGACATTCTCTTA
GCTAAAGATACTACTGAAGCCTTTGAAAAAATGGTTTCACTACTTTCTGTTTTGCTTTCCATGCAGGGTGCTGTAGACATAA
ACAAGCTTTGTGAAGAAATGCTGGACAACAGGGCAACCTTACAAGCTATAGCCTCAGAGTTTAGTTCCCTTCCATCATATG
CAGCTTTTGCTACTGCTCAAGAAGCTTATGAGCAGGCTGTTGCTAATGGTGATTCTGAAGTTGTTCTTAAAAAGTTGAAGA
AGTCTTTGAATGTGGCTAAATCTGAATTTGACCGTGATGCAGCCATGCAACGTAAGTTGGAAAAGATGGCTGATCAAGCT
ATGACCCAAATGTATAAACAGGCTAGATCTGAGGACAAGAGGGCAAAAGTTACTAGTGCTATGCAGACAATGCTTTTCAC
TATGCTTAGAAAGTTGGATAATGATGCACTCAACAACATTATCAACAATGCAAGAGATGGTTGTGTTCCCTTGAACATAAT
ACCTCTTACAACAGCAGCCAAACTAATGGTTGTCATACCAGACTATAACACATATAAAAATACGTGTGATGGTACAACATT
TACTTATGCATCAGCATTGTGGGAAATCCAACAGGTTGTAGATGCAGATAGTAAAATTGTTCAACTTAGTGAAATTAGTAT
GGACAATTCACCTAATTTAGCATGGCCTCTTATTGTAACAGCTTTAAGGGCCAATTCTGCTGTCAAATTACAGAATAATGA
GCTTAGTCCTGTTGCACTACGACAGATGTCTTGTGCTGCCGGTACTACACAAACTGCTTGCACTGATGACAATGCGTTAGC
TTACTACAACACAACAAAGGGAGGTAGGTTTGTACTTGCACTGTTATCCGATTTACAGGATTTGAAATGGGCTAGATTCCC
TAAGAGTGATGGAACTGGTACTATCTATACAGAACTGGAACCACCTTGTAGGTTTGTTACAGACACACCTAAAGGTCCTAA
AGTGAAGTATTTATACTTTATTAAAGGATTAAACAACCTAAATAGAGGTATGGTACTTGGTAGTTTAGCTGCCACAGTACG
TCTACAAGCTGGTAATGCAACAGAAGTGCCTGCCAATTCAACTGTATTATCTTTCTGTGCTTTTGCTGTAGATGCTGCTAAA
GCTTACAAAGATTATCTAGCTAGTGGGGGACAACCAATCACTAATTGTGTTAAGATGTTGTGTACACACACTGGTACTGGT
CAGGCAATAACAGTTACACCGGAAGCCAATATGGATCAAGAATCCTTTGGTGGTGCATCGTGTTGTCTGTACTGCCGTTGC
CACATAGATCATCCAAATCCTAAAGGATTTTGTGACTTAAAAGGTAAGTATGTACAAATACCTACAACTTGTGCTAATGAC
CCTGTGGGTTTTACACTTAAAAACACAGTCTGTACCGTCTGCGGTATGTGGAAAGGTTATGGCTGTAGTTGTGATCAACTC
CGCGAACCCATGCTTCAGTCAGCTGATGCACAATCGTTTTTAAACGGGTTTGCGGTGTAAGTGCAGCCCGTCTTACACCGT
GCGGCACAGGCACTAGTACTGATGTCGTATACAGGGCTTTTGACATCTACAATGATAAAGTAGCTGGTTTTGCTAAATTCC
TAAAAACTAATTGTTGTCGCTTCCAAGAAAAGGACGAAGATGACAATTTAATTGATTCTTACTTTGTAGTTAAGAGACACA
CTTTCTCTAACTACCAACATGAAGAAACAATTTATAATTTACTTAAGGATTGTCCAGCTGTTGCTAAACATGACTTCTTTAA
GTTTAGAATAGACGGTGACATGGTACCACATATATCACGTCAACGTCTTACTAAATACACAATGGCAGACCTCGTCTATGC
TTTAAGGCATTTTGATGAAGGTAATTGTGACACATTAAAAGAAATACTTGTCACATACAATTGTTGTGATGATGATTATTTC
AATAAAAAGGACTGGTATGATTTTGTAGAAAACCCAGATATATTACGCGTATACGCCAACTTAGGTGAACGTGTACGCCA
AGCTTTGTTAAAAACAGTACAATTCTGTGATGCCATGCGAAATGCTGGTATTGTTGGTGTACTGACATTAGATAATCAAGA
TCTCAATGGTAACTGGTATGATTTCGGTGATTTCATACAAACCACGCCAGGTAGTGGAGTTCCTGTTGTAGATTCTTATTAT
TCATTGTTAATGCCTATATTAACCTTGACCAGGGCTTTAACTGCAGAGTCACATGTTGACACTGACTTAACAAAGCCTTACA
TTAAGTGGGATTTGTTAAAATATGACTTCACGGAAGAGAGGTTAAAACTCTTTGACCGTTATTTTAAATATTGGGATCAGA
CATACCACCCAAATTGTGTTAACTGTTTGGATGACAGATGCATTCTGCATTGTGCAAACTTTAATGTTTTATTCTCTACAGT
GTTCCCACCTACAAGTTTTGGACCACTAGTGAGAAAAATATTTGTTGATGGTGTTCCATTTGTAGTTTCAACTGGATACCAC
TTCAGAGAGCTAGGTGTTGTACATAATCAGGATGTAAACTTACATAGCTCTAGACTTAGTTTTAAGGAATTACTTGTGTAT
GCTGCTGACCCTGCTATGCACGCTGCTTCTGGTAATCTATTACTAGATAAACGCACTACGTGCTTTTCAGTAGCTGCACTTA
CTAACAATGTTGCTTTTCAAACTGTCAAACCCGGTAATTTTAACAAAGACTTCTATGACTTTGCTGTGTCTAAGGGTTTCTTT
AAGGAAGGAAGTTCTGTTGAATTAAAACACTTCTTCTTTGCTCAGGATGGTAATGCTGCTATCAGCGATTATGACTACTAT
CGTTATAATCTACCAACAATGTGTGATATCAGACAACTACTATTTGTAGTTGAAGTTGTTGATAAGTACTTTGATTGTTACG
ATGGTGGCTGTATTAATGCTAACCAAGTCATCGTCAACAACCTAGACAAATCAGCTGGTTTTCCATTTAATAAATGGGGTA
AGGCTAGACTTTATTATGATTCAATGAGTTATGAGGATCAAGATGCACTTTTCGCATATACAAAACGTAATGTCATCCCTAC
TATAACTCAAATGAATCTTAAGTATGCCATTAGTGCAAAGAATAGAGCTCGCACCGTAGCTGGTGTCTCTATCTGTAGTAC
TATGACCAATAGACAGTTTCATCAAAAATTATTGAAATCAATAGCCGCCACTAGAGGAGCTACTGTAGTAATTGGAACAA
GCAAATTCTATGGTGGTTGGCACAACATGTTAAAAACTGTTTATAGTGATGTAGAAAACCCTCACCTTATGGGTTGGGATT
ATCCTAAATGTGATAGAGCCATGCCTAACATGCTTAGAATTATGGCCTCACTTGTTCTTGCTCGCAAACATACAACGTGTTG
TAGCTTGTCACACCGTTTCTATAGATTAGCTAATGAGTGTGCTCAAGTATTGAGTGAAATGGTCATGTGTGGCGGTTCACT
ATATGTTAAACCAGGTGGAACCTCATCAGGAGATGCCACAACTGCTTATGCTAATAGTGTTTTTAACATTTGTCAAGCTGT
CACGGCCAATGTTAATGCACTTTTATCTACTGATGGTAACAAAATTGCCGATAAGTATGTCCGCAATTTACAACACAGACTT
TATGAGTGTCTCTATAGAAATAGAGATGTTGACACAGACTTTGTGAATGAGTTTTACGCATATTTGCGTAAACATTTCTCAA
TGATGATACTCTCTGACGATGCTGTTGTGTGTTTCAATAGCACTTATGCATCTCAAGGTCTAGTGGCTAGCATAAAGAACT
TTAAGTCAGTTCTTTATTATCAAAACAATGTTTTTATGTCTGAAGCAAAATGTTGGACTGAGACTGACCTTACTAAAGGACC
TCATGAATTTTGCTCTCAACATACAATGCTAGTTAAACAGGGTGATGATTATGTGTACCTTCCTTACCCAGATCCATCAAGA
ATCCTAGGGGCCGGCTGTTTTGTAGATGATATCGTAAAAACAGATGGTACACTTATGATTGAACGGTTCGTGTCTTTAGCT
ATAGATGCTTACCCACTTACTAAACATCCTAATCAGGAGTATGCTGATGTCTTTCATTTGTACTTACAATACATAAGAAAGC
TACATGATGAGTTAACAGGACACATGTTAGACATGTATTCTGTTATGCTTACTAATGATAACACTTCAAGGTATTGGGAAC
CTGAGTTTTATGAGGCTATGTACACACCGCATACAGTCTTACAGGCTGTTGGGGCTTGTGTTCTTTGCAATTCACAGACTTC
ATTAAGATGTGGTGCTTGCATACGTAGACCATTCTTATGTTGTAAATGCTGTTACGACCATGTCATATCAACATCACATAAA
TTAGTCTTGTCTGTTAATCCGTATGTTTGCAATGCTCCAGGTTGTGATGTCACAGATGTGACTCAACTTTACTTAGGAGGTA
TGAGCTATTATTGTAAATCACATAAACCACCCATTAGTTTTCCATTGTGTGCTAATGGACAAGTTTTTGGTTTATATAAAAA
TACATGTGTTGGTAGCGATAATGTTACTGACTTTAATGCAATTGCAACATGTGACTGGACAAATGCTGGTGATTACATTTT
AGCTAACACCTGTACTGAAAGACTCAAGCTTTTTGCAGCAGAAACGCTCAAAGCTACTGAGGAGACATTTAAACTGTCTTA
TGGTATTGCTACTGTACGTGAAGTGCTGTCTGACAGAGAATTACATCTTTCATGGGAAGTTGGTAAACCTAGACCACCACT
TAACCGAAATTATGTCTTTACTGGTTATCGTGTAACTAAAAACAGTAAAGTACAAATAGGAGAGTACACCTTTGAAAAAGG
TGACTATGGTGATGCTGTTGTTTACCGAGGTACAACAACTTACAAATTAAATGTTGGTGATTATTTTGTGCTGACATCACAT
ACAGTAATGCCATTAAGTGCACCTACACTAGTGCCACAAGAGCACTATGTTAGAATTACTGGCTTATACCCAACACTCAAT
ATCTCAGATGAGTTTTCTAGCAATGTTGCAAATTATCAAAAGGTTGGTATGCAAAAGTATTCTACACTCCAGGGACCACCT
GGTACTGGTAAGAGTCATTTTGCTATTGGCCTAGCTCTCTACTACCCTTCTGCTCGCATAGTGTATACAGCTTGCTCTCATG
CCGCTGTTGATGCACTATGTGAGAAGGCATTAAAATATTTGCCTATAGATAAATGTAGTAGAATTATACCTGCACGTGCTC
GTGTAGAGTGTTTTGATAAATTCAAAGTGAATTCAACATTAGAACAGTATGTCTTTTGTACTGTAAATGCATTGCCTGAGA
CGACAGCAGATATAGTTGTCTTTGATGAAATTTCAATGGCCACAAATTATGATTTGAGTGTTGTCAATGCCAGATTACGTG
CTAAGCACTATGTGTACATTGGCGACCCTGCTCAATTACCTGCACCACGCACATTGCTAACTAAGGGCACACTAGAACCAG
AATATTTCAATTCAGTGTGTAGACTTATGAAAACTATAGGTCCAGACATGTTCCTCGGAACTTGTCGGCGTTGTCCTGCTG
AAATTGTTGACACTGTGAGTGCTTTGGTTTATGATAATAAGCTTAAAGCACATAAAGACAAATCAGCTCAATGCTTTAAAA
TGTTTTATAAGGGTGTTATCACGCATGATGTTTCATCTGCAATTAACAGGCCACAAATAGGCGTGGTAAGAGAATTCCTTA
CACGTAACCCTGCTTGGAGAAAAGCTGTCTTTATTTCACCTTATAATTCACAGAATGCTGTAGCCTCAAAGATTTTGGGACT
ACCAACTCAAACTGTTGATTCATCACAGGGCTCAGAATATGACTATGTCATATTCACTCAAACCACTGAAACAGCTCACTCT
TGTAATGTAAACAGATTTAATGTTGCTATTACCAGAGCAAAAGTAGGCATACTTTGCATAATGTCTGATAGAGACCTTTAT
GACAAGTTGCAATTTACAAGTCTTGAAATTCCACGTAGGAATGTGGCAACTTTACAAGCTGAAAATGTAACAGGACTCTTT
AAAGATTGTAGTAAGGTAATCACTGGGTTACATCCTACACAGGCACCTACACACCTCAGTGTTGACACTAAATTCAAAACT
GAAGGTTTATGTGTTGACATACCTGGCATACCTAAGGACATGACCTATAGAAGACTCATCTCTATGATGGGTTTTAAAATG
AATTATCAAGTTAATGGTTACCCTAACATGTTTATCACCCGCGAAGAAGCTATAAGACATGTACGTGCATGGATTGGCTTC
GATGTCGAGGGGTGTCATGCTACTAGAGAAGCTGTTGGTACCAATTTACCTTTACAGCTAGGTTTTTCTACAGGTGTTAAC
CTAGTTGCTGTACCTACAGGTTATGTTGATACACCTAATAATACAGATTTTTCCAGAGTTAGTGCTAAACCACCGCCTGGA
GATCAATTTAAACACCTCATACCACTTATGTACAAAGGACTTCCTTGGAATGTAGTGCGTATAAAGATTGTACAAATGTTA
AGTGACACACTTAAAAATCTCTCTGACAGAGTCGTATTTGTCTTATGGGCACATGGCTTTGAGTTGACATCTATGAAGTATT
TTGTGAAAATAGGACCTGAGCGCACCTGTTGTCTATGTGATAGACGTGCCACATGCTTTTCCACTGCTTCAGACACTTATG
CCTGTTGGCATCATTCTATTGGATTTGATTACGTCTATAATCCGTTTATGATTGATGTTCAACAATGGGGTTTTACAGGTAA
CCTACAAAGCAACCATGATCTGTATTGTCAAGTCCATGGTAATGCACATGTAGCTAGTTGTGATGCAATCATGACTAGGTG
TCTAGCTGTCCACGAGTGCTTTGTTAAGCGTGTTGACTGGACTATTGAATATCCTATAATTGGTGATGAACTGAAGATTAA
TGCGGCTTGTAGAAAGGTTCAACACATGGTTGTTAAAGCTGCATTATTAGCAGACAAATTCCCAGTTCTTCACGACATTGG
TAACCCTAAAGCTATTAAGTGTGTACCTCAAGCTGATGTAGAATGGAAGTTCTATGATGCACAGCCTTGTAGTGACAAAGC
TTATAAAATAGAAGAATTATTCTATTCTTATGCCACACATTCTGACAAATTCACAGATGGTGTATGCCTATTTTGGAATTGC
AATGTCGATAGATATCCTGCTAATTCCATTGTTTGTAGATTTGACACTAGAGTGCTATCTAACCTTAACTTGCCTGGTTGTG
ATGGTGGCAGTTTGTATGTAAATAAACATGCATTCCACACACCAGCTTTTGATAAAAGTGCTTTTGTTAATTTAAAACAATT
ACCATTTTTCTATTACTCTGACAGTCCATGTGAGTCTCATGGAAAACAAGTAGTGTCAGATATAGATTATGTACCACTAAAG
TCTGCTACGTGTATAACACGTTGCAATTTAGGTGGTGCTGTCTGTAGACATCATGCTAATGAGTACAGATTGTATCTCGAT
GCTTATAACATGATGATCTCAGCTGGCTTTAGCTTGTGGGTTTACAAACAATTTGATACTTATAACCTCTGGAACACTTTTA
CAAGACTTCAGAGTTTAGAAAATGTGGCTTTTAATGTTGTAAATAAGGGACACTTTGATGGACAACAGGGTGAAGTACCA
GTTTCTATCATTAATAACACTGTTTACACAAAAGTTGATGGTGTTGATGTAGAATTGTTTGAAAATAAAACAACATTACCTG
TTAATGTAGCATTTGAGCTTTGGGCTAAGCGCAACATTAAACCAGTACCAGAGGTGAAAATACTCAATAATTTGGGTGTG
GACATTGCTGCTAATACTGTGATCTGGGACTACAAAAGAGATGCTCCAGCACATATATCTACTATTGGTGTTTGTTCTATG
ACTGACATAGCCAAGAAACCAACTGAAACGATTTGTGCACCACTCACTGTCTTTTTTGATGGTAGAGTTGATGGTCAAGTA
GACTTATTTAGAAATGCCCGTAATGGTGTTCTTATTACAGAAGGTAGTGTTAAAGGTTTACAACCATCTGTAGGTCCCAAA
CAAGCTAGTCTTAATGGAGTCACATTAATTGGAGAAGCCGTAAAAACACAGTTCAATTATTATAAGAAAGTTGATGGTGTT
GTCCAACAATTACCTGAAACTTACTTTACTCAGAGTAGAAATTTACAAGAATTTAAACCCAGGAGTCAAATGGAAATTGAT
TTCTTAGAATTAGCTATGGATGAATTCATTGAACGGTATAAATTAGAAGGCTATGCCTTCGAACATATCGTTTATGGAGAT
TTTAGTCATAGTCAGTTAGGTGGTTTACATCTACTGATTGGACTAGCTAAACGTTTTAAGGAATCACCTTTTGAATTAGAAG
ATTTTATTCCTATGGACAGTACAGTTAAAAACTATTTCATAACAGATGCGCAAACAGGTTCATCTAAGTGTGTGTGTTCTGT
TATTGATTTATTACTTGATGATTTTGTTGAAATAATAAAATCCCAAGATTTATCTGTAGTTTCTAAGGTTGTCAAAGTGACT
ATTGACTATACAGAAATTTCATTTATGCTTTGGTGTAAAGATGGCCATGTAGAAACATTTTACCCAAAATTACAATCTAGTC
AAGCGTGGCAACCGGGTGTTGCTATGCCTAATCTTTACAAAATGCAAAGAATGCTATTAGAAAAGTGTGACCTTCAAAATT
ATGGTGATAGTGCAACATTACCTAAAGGCATAATGATGAATGTCGCAAAATATACTCAACTGTGTCAATATTTAAACACAT
TAACATTAGCTGTACCCTATAATATGAGAGTTATACATTTTGGTGCTGGTTCTGATAAAGGAGTTGCACCAGGTACAGCTG
TTTTAAGACAGTGGTTGCCTACGGGTACGCTGCTTGTCGATTCAGATCTTAATGACTTTGTCTCTGATGCAGATTCAACTTT
GATTGGTGATTGTGCAACTGTACATACAGCTAATAAATGGGATCTCATTATTAGTGATATGTACGACCCTAAGACTAAAAA
TGTTACAAAAGAAAATGACTCTAAAGAGGGTTTTTTCACTTACATTTGTGGGTTTATACAACAAAAGCTAGCTCTTGGAGG
TTCCGTGGCTATAAAGATAACAGAACATTCTTGGAATGCTGATCTTTATAAGCTCATGGGACACTTCGCATGGTGGACAGC
CTTTGTTACTAATGTGAATGCGTCATCATCTGAAGCATTTTTAATTGGATGTAATTATCTTGGCAAACCACGCGAACAAATA
GATGGTTATGTCATGCATGCAAATTACATATTTTGGAGGAATACAAATCCAATTCAGTTGTCTTCCTATTCTTTATTTGACAT
GAGTAAATTTCCCCTTAAATTAAGGGGTACTGCTGTTATGTCTTTAAAAGAAGGTCAAATCAATGATATGATTTTATCTCTT
CTTAGTAAAGGTAGACTTATAATTAGAGAAAACAACAGAGTTGTTATTTCTAGTGATGTTCTTGTTAACAACTAAACGAAC
AATGTTTGTTTTTCTTGTTTTATTGCCACTAGTCTCTAGTCAGTGTGTTAATCTTACAACCAGAACTCAATTACCCCCTGCAT
ACACTAATTCTTTCACACGTGGTGTTTATTACCCTGACAAAGTTTTCAGATCCTCAGTTTTACATTCAACTCAGGACTTGTTC
TTACCTTTCTTTTCCAATGTTACTTGGTTCCATGCTATACATGTCTCTGGGACCAATGGTACTAAGAGGTTTGATAACCCTGT
CCTACCATTTAATGATGGTGTTTATTTTGCTTCCACTGAGAAGTCTAACATAATAAGAGGCTGGATTTTTGGTACTACTTTA
GATTCGAAGACCCAGTCCCTACTTATTGTTAATAACGCTACTAATGTTGTTATTAAAGTCTGTGAATTTCAATTTTGTAATG
ATCCATTTTTGGGTGTTTATTACCACAAAAACAACAAAAGTTGGATGGAAAGTGAGTTCAGAGTTTATTCTAGTGCGAATA
ATTGCACTTTTGAATATGTCTCTCAGCCTTTTCTTATGGACCTTGAAGGAAAACAGGGTAATTTCAAAAATCTTAGGGAATT
TGTGTTTAAGAATATTGATGGTTATTTTAAAATATATTCTAAGCACACGCCTATTAATTTAGTGCGTGATCTCCCTCAGGGT
TTTTCGGCTTTAGAACCATTGGTAGATTTGCCAATAGGTATTAACATCACTAGGTTTCAAACTTTACTTGCTTTACATAGAA
GTTATTTGACTCCTGGTGATTCTTCTTCAGGTTGGACAGCTGGTGCTGCAGCTTATTATGTGGGTTATCTTCAACCTAGGAC
TTTTCTATTAAAATATAATGAAAATGGAACCATTACAGATGCTGTAGACTGTGCACTTGACCCTCTCTCAGAAACAAAGTG
TACGTTGAAATCCTTCACTGTAGAAAAAGGAATCTATCAAACTTCTAACTTTAGAGTCCAACCAACAGAATCTATTGTTAGA
TTTCCTAATATTACAAACTTGTGCCCTTTTGGTGAAGTTTTTAACGCCACCAGATTTGCATCTGTTTATGCTTGGAACAGGA
AGAGAATCAGCAACTGTGTTGCTGATTATTCTGTCCTATATAATTCCGCATCATTTTCCACTTTTAAGTGTTATGGAGTGTCT
CCTACTAAATTAAATGATCTCTGCTTTACTAATGTCTATGCAGATTCATTTGTAATTAGAGGTGATGAAGTCAGACAAATCG
CTCCAGGGCAAACTGGAAAGATTGCTGATTATAATTATAAATTACCAGATGATTTTACAGGCTGCGTTATAGCTTGGAATT
CTAACAATCTTGATTCTAAGGTTGGTGGTAATTATAATTACCTGTATAGATTGTTTAGGAAGTCTAATCTCAAACCTTTTGA
GAGAGATATTTCAACTGAAATCTATCAGGCCGGTAGCACACCTTGTAATGGTGTTGAAGGTTTTAATTGTTACTTTCCTTTA
CAATCATATGGTTTCCAACCCACTAATGGTGTTGGTTACCAACCATACAGAGTAGTAGTACTTTCTTTTGAACTTCTACATG
CACCAGCAACTGTTTGTGGACCTAAAAAGTCTACTAATTTGGTTAAAAACAAATGTGTCAATTTCAACTTCAATGGTTTAAC
AGGCACAGGTGTTCTTACTGAGTCTAACAAAAAGTTTCTGCCTTTCCAACAATTTGGCAGAGACATTGCTGACACTACTGA
TGCTGTCCGTGATCCACAGACACTTGAGATTCTTGACATTACACCATGTTCTTTTGGTGGTGTCAGTGTTATAACACCAGGA
ACAAATACTTCTAACCAGGTTGCTGTTCTTTATCAGGATGTTAACTGCACAGAAGTCCCTGTTGCTATTCATGCAGATCAAC
TTACTCCTACTTGGCGTGTTTATTCTACAGGTTCTAATGTTTTTCAAACACGTGCAGGCTGTTTAATAGGGGCTGAACATGT
CAACAACTCATATGAGTGTGACATACCCATTGGTGCAGGTATATGCGCTAGTTATCAGACTCAGACTAATTCTCCTCGGCG
GGCACGTAGTGTAGCTAGTCAATCCATCATTGCCTACACTATGTCACTTGGTGCAGAAAATTCAGTTGCTTACTCTAATAAC
TCTATTGCCATACCCACAAATTTTACTATTAGTGTTACCACAGAAATTCTACCAGTGTCTATGACCAAGACATCAGTAGATT
GTACAATGTACATTTGTGGTGATTCAACTGAATGCAGCAATCTTTTGTTGCAATATGGCAGTTTTTGTACACAATTAAACCG
TGCTTTAACTGGAATAGCTGTTGAACAAGACAAAAACACCCAAGAAGTTTTTGCACAAGTCAAACAAATTTACAAAACACC
ACCAATTAAAGATTTTGGTGGTTTTAATTTTTCACAAATATTACCAGATCCATCAAAACCAAGCAAGAGGTCATTTATTGAA
GATCTACTTTTCAACAAAGTGACACTTGCAGATGCTGGCTTCATCAAACAATATGGTGATTGCCTTGGTGATATTGCTGCTA
GAGACCTCATTTGTGCACAAAAGTTTAACGGCCTTACTGTTTTGCCACCTTTGCTCACAGATGAAATGATTGCTCAATACAC
TTCTGCACTGTTAGCGGGTACAATCACTTCTGGTTGGACCTTTGGTGCAGGTGCTGCATTACAAATACCATTTGCTATGCA
AATGGCTTATAGGTTTAATGGTATTGGAGTTACACAGAATGTTCTCTATGAGAACCAAAAATTGATTGCCAACCAATTTAA
TAGTGCTATTGGCAAAATTCAAGACTCACTTTCTTCCACAGCAAGTGCACTTGGAAAACTTCAAGATGTGGTCAACCAAAA
TGCACAAGCTTTAAACACGCTTGTTAAACAACTTAGCTCCAATTTTGGTGCAATTTCAAGTGTTTTAAATGATATCCTTTCAC
GTCTTGACAAAGTTGAGGCTGAAGTGCAAATTGATAGGTTGATCACAGGCAGACTTCAAAGTTTGCAGACATATGTGACT
CAACAATTAATTAGAGCTGCAGAAATCAGAGCTTCTGCTAATCTTGCTGCTACTAAAATGTCAGAGTGTGTACTTGGACAA
TCAAAAAGAGTTGATTTTTGTGGAAAGGGCTATCATCTTATGTCCTTCCCTCAGTCAGCACCTCATGGTGTAGTCTTCTTGC
ATGTGACTTATGTCCCTGCACAAGAAAAGAACTTCACAACTGCTCCTGCCATTTGTCATGATGGAAAAGCACACTTTCCTC
GTGAAGGTGTCTTTGTTTCAAATGGCACACACTGGTTTGTAACACAAAGGAATTTTTATGAACCACAAATCATTACTACAG
ACAACACATTTGTGTCTGGTAACTGTGATGTTGTAATAGGAATTGTCAACAACACAGTTTATGATCCTTTGCAACCTGAATT
AGACTCATTCAAGGAGGAGTTAGATAAATATTTTAAGAATCATACATCACCAGATGTTGATTTAGGTGACATCTCTGGCAT
TAATGCTTCAGTTGTAAACATTCAAAAAGAAATTGACCGCCTCAATGAGGTTGCCAAGAATTTAAATGAATCTCTCATCGA
TCTCCAAGAACTTGGAAAGTATGAGCAGTATATAAAATGGCCATGGTACATTTGGCTAGGTTTTATAGCTGGCTTGATTGC
CATAGTAATGGTGACAATTATGCTTTGCTGTATGACCAGTTGCTGTAGTTGTCTCAAGGGCTGTTGTTCTTGTGGATCCTGC
TGCAAATTTGATGAAGACGACTCTGAGCCAGTGCTCAAAGGAGTCAAATTACATTACACATAAACGAACTTATGGATTTGT
TTATGAGAATCTTCACAATTGGAACTGTAACTTTGAAGCAAGGTGAAATCAAGGATGCTACTCCTTCAGATTTTGTTCGCG
CTACTGCAACGATACCGATACAAGCCTCACTCCCTTTCGGATGGCTTATTGTTGGCGTTGCACTTCTTGCTGTTTTTCAGAG
CGCTTCCAAAATCATAACCCTCAAAAAGAGATGGCAACTAGCACTCTCCAAGGGTGTTCACTTTGTTTGCAACTTGCTGTT
GTTGTTTGTAACAGTTTACTCACACCTTTTGCTCGTTGCTGCTGGCCTTGAAGCCCCTTTTCTCTATCTTTATGCTTTAGTCTA
CTTCTTGCAGAGTATAAACTTTGTAAGAATAATAATGAGGCTTTGGCTTTGCTGGAAATGCCGTTCCAAAAACCCATTACTT
TATGATGCCAACTATTTTCTTTGCTGGCATACTAATTGTTACGACTATTGTATACCTTACAATAGTGTAACTTCTTCAATTGT
CATTACTTCAGGTGATGGCACAACAAGTCCTATTTCTGAACATGACTACCAGATTGGTGGTTATACTGAAAAATGGGAATC
TGGAGTAAAAGACTGTGTTGTATTACACAGTTACTTCACTTCAGACTATTACCAGCTGTACTCAACTCAATTGAGTACAGAC
ACTGGTGTTGAACATGTTACCTTCTTCATCTACAATAAAATTGTTGATGAGCCTGAAGAACATGTCCAAATTCACACAATCG
ACGTTTCATCCGGAGTTGTTAATCCAGTAATGGAACCAATTTATGATGAACCGACGACGACTACTAGCGTGCCTTTGTAAG
CACAAGCTGATGAGTACGAACTTATGTACTCATTCGTTTCGGAAGAGACAGGTACGTTAATAGTTAATAGCGTACTTCTTT
TTCTTGCTTTCGTGGTATTCTTGCTAGTTACACTAGCCATCCTTACTGCGCTTCGATTGTGTGCGTACTGCTGCAATATTGTT
AACGTGAGTCTTGTAAAACCTTCTTTTTACGTTTACTCTCGTGTTAAAAATCTGAATTCTTCTAGAGTTCCTGATCTTCTGGT
CTAAACGAACTAAATATTATATTAGTTTTTCTGTTTGGAACTTTAATTTTAGCCATGGCAGATTCCAACGGTACTATTACCGT
TGAAGAGCTTAAAAAGCTCCTTGAACAATGGAACCTAGTAATAGGTTTCCTATTCCTTACATGGATTTGTCTTCTACAATTT
GCCTATGCCAACAGGAATAGGTTTTTGTATATAATTAAGTTAATTTTCCTCTGGCTGTTATGGCCAGTAACTTTAGCTTGTT
TTGTGCTTGCTGCTGTTTACAGAATAAATTGGATCACCGGTGGAATTGCTATCGCAATGGCTTGTCTTGTAGGCTTGATGT
GGCTCAGCTACTTCATTGCTTCTTTCAGACTGTTTGCGCGTACGCGTTCCATGTGGTCATTCAATCCAGAAACTAACATTCT
TCTCAACGTGCCACTCCATGGCACTATTCTGACCAGACCGCTTCTAGAAAGTGAACTCGTAATCGGAGCTGTGATCCTTCG
TGGACATCTTCGTATTGCTGGACACCATCTAGGACGCTGTGACATCAAGGACCTGCCTAAAGAAATCACTGTTGCTACATC
ACGAACGCTTTCTTATTACAAATTGGGAGCTTCGCAGCGTGTAGCAGGTGACTCAGGTTTTGCTGCATACAGTCGCTACAG
GATTGGCAACTATAAATTAAACACAGACCATTCCAGTAGCAGTGACAATATTGCTTTGCTTGTACAGTAAGTGACAACAGA
TGTTTCATCTCGTTGACTTTCAGGTTACTATAGCAGAGATATTACTAATTATTATGAGGACTTTTAAAGTTTCCATTTGGAAT
CTTGATTACATCATAAACCTCATAATTAAAAATTTATCTAAGTCACTAACTGAGAATAAATATTCTCAATTAGATGAAGAGC
AACCAATGGAGATTGATTAAACGAACATGAAAATTATTCTTTTCTTGGCACTGATAACACTCGCTACTTGTGAGCTTTATCA
CTACCAAGAGTGTGTTAGAGGTACAACAGTACTTTTAAAAGAACCTTGCTCTTCTGGAACATACGAGGGCAATTCACCATT
TCATCCTCTAGCTGATAACAAATTTGCACTGACTTGCTTTAGCACTCAATTTGCTTTTGCTTGTCCTGACGGCGTAAAACAC
GTCTATCAGTTACGTGCCAGATCAGTTTCACCTAAACTGTTCATCAGACAAGAGGAAGTTCAAGAACTTTACTCTCCAATTT
TTCTTATTGTTGCGGCAATAGTGTTTATAACACTTTGCTTCACACTCAAAAGAAAGACAGAATGATTGAACTTTCATTAATT
GACTTCTATTTGTGCTTTTTAGCCTTTCTGCTATTCCTTGTTTTAATTATGCTTATTATCTTTTGGTTCTCACTTGAACTGCAA
GATCATAATGAAACTTGTCACGCCTAAACGAACATGAAATTTCTTGTTTTCTTAGGAATCATCACAACTGTAGCTGCATTTC
ACCAAGAATGTAGTTTACAGTCATGTACTCAACATCAACCATATGTAGTTGATGACCCGTGTCCTATTCACTTCTATTCTAA
ATGGTATATTAGAGTAGGAGCTAGAAAATCAGCACCTTTAATTGAATTGTGCGTGGATGAGGCTGGTTCTAAATCACCCA
TTCAGTACATCGATATCGGTAATTATACAGTTTCCTGTTTACCTTTTACAATTAATTGCCAGGAACCTAAATTGGGTAGTCTT
GTAGTGCGTTGTTCGTTCTATGAAGACTTTTTAGAGTATCATGACGTTCGTGTTGTTTTAGATTTCATCTAAACGAACAAAC
TAAAATGTCTGATAATGGACCCCAAAATCAGCGAAATGCACCCCGCATTACGTTTGGTGGACCCTCAGATTCAACTGGCA
GTAACCAGAATGGAGAACGCAGTGGGGCGCGATCAAAACAACGTCGGCCCCAAGGTTTACCCAATAATACTGCGTCTTG
GTTCACCGCTCTCACTCAACATGGCAAGGAAGACCTTAAATTCCCTCGAGGACAAGGCGTTCCAATTAACACCAATAGCAG
TCCAGATGACCAAATTGGCTACTACCGAAGAGCTACCAGACGAATTCGTGGTGGTGACGGTAAAATGAAAGATCTCAGTC
CAAGATGGTATTTCTACTACCTAGGAACTGGGCCAGAAGCTGGACTTCCCTATGGTGCTAACAAAGACGGCATCATATGG
GTTGCAACTGAGGGAGCCTTGAATACACCAAAAGATCACATTGGCACCCGCAATCCTGCTAACAATGCTGCAATCGTGCT
ACAACTTCCTCAAGGAACAACATTGCCAAAAGGCTTCTACGCAGAAGGGAGCAGAGGCGGCAGTCAAGCCTCTTCTCGTT
CCTCATCACGTAGTCGCAACAGTTCAAGAAATTCAACTCCAGGCAGCAGTAGGGGAACTTCTCCTGCTAGAATGGCTGGC
AATGGCGGTGATGCTGCTCTTGCTTTGCTGCTGCTTGACAGATTGAACCAGCTTGAGAGCAAAATGTCTGGTAAAGGCCA
ACAACAACAAGGCCAAACTGTCACTAAGAAATCTGCTGCTGAGGCTTCTAAGAAGCCTCGGCAAAAACGTACTGCCACTA
AAGCATACAATGTAACACAAGCTTTCGGCAGACGTGGTCCAGAACAAACCCAAGGAAATTTTGGGGACCAGGAACTAATC
AGACAAGGAACTGATTACAAACATTGGCCGCAAATTGCACAATTTGCCCCCAGCGCTTCAGCGTTCTTCGGAATGTCGCGC
ATTGGCATGGAAGTCACACCTTCGGGAACGTGGTTGACCTACACAGGTGCCATCAAATTGGATGACAAAGATCCAAATTT
CAAAGATCAAGTCATTTTGCTGAATAAGCATATTGACGCATACAAAACATTCCCACCAACAGAGCCTAAAAAGGACAAAA
AGAAGAAGGCTGATGAAACTCAAGCCTTACCGCAGAGACAGAAGAAACAGCAAACTGTGACTCTTCTTCCTGCTGCAGAT
TTGGATGATTTCTCCAAACAATTGCAACAATCCATGAGCAGTGCTGACTCAACTCAGGCCTAAACTCATGCAGACCACACA
AGGCAGATGGGCTATATAAACGTTTTCGCTTTTCCGTTTACGATATATAGTCTACTCTTGTGCAGAATGAATTCTCGTAACT
ACATAGCACAAGTAGATGTAGTTAACTTTAATCTCACATAGCAATCTTTAATCAGTGTGTAACATTAGGGAGGACTTGAAA
GAGCCACCACATTTTCACCGAGGCCACGCGGAGTACGATCGAGTGTACAGTGAACAATGCTAGGGAGAGCTGCCTATAT
GGAAGAGCCCTAATGTGTAAAATTAATTTTAGTAGTGCTATCCCCATGTGATTTTAATAGCTTCTTAGGAGAAT
SEQ ID NO: 10
>Severe acute respiratory syndrome coronavirus 2 orf1ab polyprotein of isolate hCoV-19/Italy/
INMI1-isl/2020 (Genbank Acc. No: QIA98553)
MESLVPGFNEKTHVQLSLPVLQVRDVLVRGFGDSVEEVLSEARQHLKDGTCGLVEVEKGVLPQLEQPYVFIKRSDARTAPHGH
VMVELVAELEGIQYGRSGETLGVLVPHVGEIPVAYRKVLLRKNGNKGAGGHSYGADLKSFDLGDELGTDPYEDFQENWNTKH
SSGVTRELMRELNGGAYTRYVDNNFCGPDGYPLECIKDLLARAGKASCTLSEQLDFIDTKRGVYCCREHEHEIAWYTERSEKSYE
LQTPFEIKLAKKFDTFNGECPNFVFPLNSIIKTIQPRVEKKKLDGFMGRIRSVYPVASPNECNQMCLSTLMKCDHCGETSWQTG
DFVKATCEFCGTENLTKEGATTCGYLPQNAVVKIYCPACHNSEVGPEHSLAEYHNESGLKTILRKGGRTIAFGGCVFSYVGCHNK
CAYWVPRASANIGCNHTGVVGEGSEGLNDNLLEILQKEKVNINIVGQFKLNEEIAHILASFSASTSAFVETVKGLDYKAFKQIVESC
GNFKVTKGKAKKGAWNIGEQKSILSPLYAFASEAARVVRSIFSRTLETAQNSVRVLQKAAITILDGISQYSLRLIDAMMFTSDLAT
NNLVVMAYITGGVVQLTSQWLTNIFGTVYEKLKPVLDWLEEKFKEGVEFLRDGWEIVKFISTCACEIVGGQIVTCAKEIKESVQT
FFKLVNKFLALCADSIIIGGAKLKALNLGETFVTHSKGLYRKCVKSREETGLLMPLKAPKEIIFLEGETLPTEVLTEEVVLKTGDLQPL
EQPTSEAVEAPLVGTPVCINGLMLLEIKDTEKYCALAPNMMVTNNTFTLKGGAPTKVTFGDDTVIEVQGYKSVNITFELDERIDK
VLNEKCSAYTVELGTEVNEFACVVADAVIKTLQPVSELLTPLGIDLDEWSMATYYLFDESGEFKLASHMYCSFYPPDEDEEEGDC
EEEEFEPSTQYEYGTEDDYQGKPLEFGATSAALQPEEEQEEDWLDDDSQQTVGQQDGSEDNQTTTIQTIVEVQPQLEMELTP
VVQTIEVNSFSGYLKLTDNVYIKNADIVEEAKKVKPTVVVNAANVYLKHGGGVAGALNKATNNAMQVESDDYIATNGPLKVG
GSCVLSGHNLAKHCLHVVGPNVNKGEDIQLLKSAYENFNQHEVLLAPLLSAGIFGADPIHSLRVCVDTVRTNVYLAVFDKNLYD
KLVSSFLEMKSEKQVEQKIAEIPKEEVKPFITESKPSVEQRKQDDKKIKACVEEVTTTLEETKFLTENLLLYIDINGNLHPDSATLVSD
IDITFLKKDAPYIVGDVVQEGVLTAVVIPTKKAGGTTEMLAKALRKVPTDNYITTYPGQGLNGYTVEEAKTVLKKCKSAFYILPSIIS
NEKQEILGTVSWNLREMLAHAEETRKLMPVCVETKAIVSTIQRKYKGIKIQEGVVDYGARFYFYTSKTTVASLINTLNDLNETLVT
MPLGYVTHGLNLEEAARYMRSLKVPATVSVSSPDAVTAYNGYLTSSSKTPEEHFIETISLAGSYKDWSYSGQSTQLGIEFLKRGD
KSVYYTSNPTTFHLDGEVITFDNLKTLLSLREVRTIKVFTTVDNINLHTQWVDMSMTYGQQFGPTYLDGADVTKIKPHNSHEGKT
FYVLPNDDTLRVEAFEYYHTTDPSFLGRYMSALNHTKKWKYPQVNGLTSIKWADNNCYLATALLTLQQIELKFNPPALQDAYYR
ARAGEAANFCALILAYCNKTVGELGDVRETMSYLFQHANLDSCKRVLNVVCKTCGQQQTTLKGVEAVMYMGTLSYEQFKKGV
QIPCTCGKQATKYLVQQESPFVMMSAPPAQYELKHGTFTCASEYTGNYQCGHYKHITSKETLYCIDGALLTKSSEYKGPITDVFY
KENSYTTTIKPVTYKLDGVVCTEIDPKLDNYYKKDNSYFTEQPIDLVPNQPYPNASFDNFKFVCDNIKFADDLNQLTGYKKPASRE
LKVTFFPDLNGDVVAIDYKHYTPSFKKGAKLLHKPIVWHVNNATNKATYKPNTWCIRCLWSTKPVETSNSFDVLKSEDAQGMD
NLACEDLKPVSEEVVENPTIQKDVLECNVKTTEVVGDIILKPANNSLKITEEVGHTDLMAAYVDNSSLTIKKPNELSRVLGLKTLAT
HGLAAVNSVPWDTIANYAKPFLNKVVSTTTNIVTRCLNRVCTNYMPYFFTLLLQLCTFTRSTNSRIKASMPTTIAKNTVKSVGKF
CLEASFNYLKSPNFSKLINIIIWFLLLSVCLGSLIYSTAALGVLMSNLGMPSYCTGYREGYLNSTNVTIATYCTGSIPCSVCLSGLDSL
DTYPSLETIQITISSFKWDLTAFGLVAEWFLAYILFTRFFYVLGLAAIMQLFFSYFAVHFISNSWLMWLIINLVQMAPISAMVRMY
IFFASFYYVWKSYVHVVDGCNSSTCMMCYKRNRATRVECTTIVNGVRRSFYVYANGGKGFCKLHNWNCVNCDTFCAGSTFIS
DEVARDLSLQFKRPINPTDQSSYIVDSVTVKNGSIHLYFDKAGQKTYERHSLSHFVNLDNLRANNTKGSLPINVIVFDGKSKCEES
SAKSASVYYSQLMCQPILLLDQALVSDVGDSAEVAVKMFDAYVNTFSSTFNVPMEKLKTLVATAEAELAKNVSLDNVLSTFISAA
RQGFVDSDVETKDVVECLKLSHQSDIEVTGDSCNNYMLTYNKVENMTPRDLGACIDCSARHINAQVAKSHNIALIWNVKDFM
SLSEQLRKQIRSAAKKNNLPFKLTCATTRQVVNVVTTKIALKGGKIVNNWLKQLIKVTLVFLFVAAIFYLITPVHVMSKHTDFSSEII
GYKAIDGGVTRDIASTDTCFANKHADFDTWFSQRGGSYTNDKACPLIAAVITREVGFVVPGLPGTILRTTNGQFLHFLPRVFSAV
GNICYTPSKLIEYTDFATSACVLAAECTIFKDASGKPVPYCYDTNVLEGSVAYESLRPDTRYVLMDGSIIQFPNTYLEGSVRVVTTF
DSEYCRHGTCERSEAGVCVSTSGRWVLNNDYYRSLPGVFCGVDAVNLLTNMFTPLIQPIGALDISASIVAGGIVAIVVTCLAYYF
MRFRRAFGEYSHVVAFNTLLFLMSFTVLCLTPVYSFLPGVYSVIYLYLTFYLTNDVSFLAHIQWMVMFTPLVPFWITIAYIICISTK
HFYWFFSNYLKRRVVFNGVSFSTFEEAALCTFLLNKEMYLKLRSDVLLPLTQYNRYLALYNKYKYFSGAMDTTSYREAACCHLAK
ALNDFSNSGSDVLYQPPQTSITSAVLQSGFRKMAFPSGKVEGCMVQVTCGTTTLNGLWLDDVVYCPRHVICTSEDMLNPNYE
DLLIRKSNHNFLVQAGNVQLRVIGHSMQNCVLKLKVDTANPKTPKYKFVRIQPGQTFSVLACYNGSPSGVYQCAMRPNFTIKG
SFLNGSCGSVGFNIDYDCVSFCYMHHMELPTGVHAGTDLEGNFYGPFVDRQTAQAAGTDTTITVNVLAWLYAAVINGDRWF
LNRFTTTLNDFNLVAMKYNYEPLTQDHVDILGPLSAQTGIAVLDMCASLKELLQNGMINGRTILGSALLEDEFTPFDVVRQCSGV
TFQSAVKRTIKGTHHWLLLTILTSLLVLVQSTQWSLFFFXYENAFLPFAMGIIAMSAFAMMFVKHKHAFLCLFLLPSLATVAYFN
MVYMPASWVMRIMTWLDMVDTSLSGFKLKDCVMYASAVVLLILMTARTVYDDGARRVWTLMNVLTLVYKVYYGNALDQA
ISMWALIISVTSNYSGVVTTVMFLARGIVFMCVEYCPIFFITGNTLQCIMLVYCFLGYFCTCYFGLFCLLNRYFRLTLGVYDYLVST
QEFRYMNSQGLLPPKNSIDAFKLNIKLLGVGGKPCIKVATVQSKMSDVKCTSVVLLSVLQQLRVESSSKLWAQCVQLHNDILLA
KDTTEAFEKMVSLLSVLLSMQGAVDINKLCEEMLDNRATLQAIASEFSSLPSYAAFATAQEAYEQAVANGDSEVVLKKLKKSLN
VAKSEFDRDAAMQRKLEKMADQAMTQMYKQARSEDKRAKVTSAMQTMLFTMLRKLDNDALNNIINNARDGCVPLNIIPLT
TAAKLMVVIPDYNTYKNTCDGTTFTYASALWEIQQVVDADSKIVQLSEISMDNSPNLAWPLIVTALRANSAVKLQNNELSPVAL
RQMSCAAGTTQTACTDDNALAYYNTTKGGRFVLALLSDLQDLKWARFPKSDGTGTIYTELEPPCRFVTDTPKGPKVKYLYFIKG
LNNLNRGMVLGSLAATVRLQAGNATEVPANSTVLSFCAFAVDAAKAYKDYLASGGQPITNCVKMLCTHTGTGQAITVTPEAN
MDQESFGGASCCLYCRCHIDHPNPKGFCDLKGKYVQIPTTCANDPVGFTLKNTVCTVCGMWKGYGCSCDQLREPMLQSADA
QSFLNRVCGVSAARLTPCGTGTSTDVVYRAFDIYNDKVAGFAKFLKTNCCRFQEKDEDDNLIDSYFVVKRHTFSNYQHEETIYNL
LKDCPAVAKHDFFKFRIDGDMVPHISRQRLTKYTMADLVYALRHFDEGNCDTLKEILVTYNCCDDDYFNKKDWYDFVENPDIL
RVYANLGERVRQALLKTVQFCDAMRNAGIVGVLTLDNQDLNGNWYDFGDFIQTTPGSGVPVVDSYYSLLMPILTLTRALTAES
HVDTDLTKPYIKWQLLKYDFTEERLKLFDRYFKYWDQTYHPNCVNCLDDRCILHCANFNVLFSTVFPPTSFGPLVRKIFVDGVPF
VVSTGYHFRELGVVHNQDVNLHSSRLSFKELLVYAADPAMHAASGNLLLDKRTTCFSVAALTNNVAFQTVKPGNFNKDFYDFA
VSKGFFKEGSSVELKHFFFAQDGNAAISDYDYYRYNLPTMCDIRQLLFVVEVVDKYFDCYDGGCINANQVIVNNLDKSAGFPFN
KWGKARLYYDSMSYEDQDALFAYTKRNVIPTITQMNLKYAISAKNRARTVAGVSICSTMTNRQFHQKLLKSIAATRGATVVIGT
SKFYGGWHNMLKTVYSDVENPHLMGWDYPKCDRAMPNMLRIMASLVLARKHTTCCSLSHRFYRLANECAQVLSEMVMCG
GSLYVKPGGTSSGDATTAYANSVFNICQAVTANVNALLSTDGNKIADKYVRNLQHRLYECLYRNRDVDTDFVNEFYAYLRKHFS
MMILSDDAVVCFNSTYASQGLVASIKNFKSVLYYQNNVFMSEAKCWTETDLTKGPHEFCSQHTMLVKQGDDYVYLPYPDPSRI
LGAGCFVDDIVKTDGTLMIERFVSLAIDAYPLTKHPNQEYADVFHLYLQYIRKLHDELTGHMLDMYSVMLTNDNTSRYWEPEF
YEAMYTPHTVLQAVGACVLCNSQTSLRCGACIRRPFLCCKCCYDHVISTSHKLVLSVNPYVCNAPGCDVTDVTQLYLGGMSYYC
KSHKPPISFPLCANGQVFGLYKNTCVGSDNVTDFNAIATCDWTNAGDYILANTCTERLKLFAAETLKATEETFKLSYGIATVREVL
SDRELHLSWEVGKPRPPLNRNYVFTGYRVTKNSKVQIGEYTFEKGDYGDAVVYRGTTTYKLNVGDYFVLTSHTVMPLSAPTLVP
QEHYVRITGLYPTLNISDEFSSNVANYQKVGMQKYSTLQGPPGTGKSHFAIGLALYYPSARIVYTACSHAAVDALCEKALKYLPID
KCSRIIPARARVECFDKFKVNSTLEQYVFCTVNALPETTADIVVFDEISMATNYDLSVVNARLRAKHYVYIGDPAQLPAPRTLLTK
GTLEPEYFNSVCRLMKTIGPDMFLGTCRRCPAEIVDTVSALVYDNKLKAHKDKSAQCFKMFYKGVITHDVSSAINRPQIGVVREF
LTRNPAWRKAVFISPYNSQNAVASKILGLPTQTVDSSQGSEYDYVIFTQTTETAHSCNVNRFNVAITRAKVGILCIMSDRDLYDK
LQFTSLEIPRRNVATLQAENVTGLFKDCSKVITGLHPTQAPTHLSVDTKFKTEGLCVDIPGIPKDMTYRRLISMMGFKMNYQVN
GYPNMFITREEAIRHVRAWIGFDVEGCHATREAVGTNLPLQLGFSTGVNLVAVPTGYVDTPNNTDFSRVSAKPPPGDQFKHLI
PLMYKGLPWNVVRIKIVQMLSDTLKNLSDRVVFVLWAHGFELTSMKYFVKIGPERTCCLCDRRATCFSTASDTYACWHHSIGF
DYVYNPFMIDVQQWGFTGNLQSNHDLYCQVHGNAHVASCDAIMTRCLAVHECFVKRVDWTIEYPIIGDELKINAACRKVQH
MVVKAALLADKFPVLHDIGNPKAIKCVPQADVEWKFYDAQPCSDKAYKIEELFYSYATHSDKFTDGVCLFWNCNVDRYPANSI
VCRFDTRVLSNLNLPGCDGGSLYVNKHAFHTPAFDKSAFVNLKQLPFFYYSDSPCESHGKQVVSDIDYVPLKSATCITRQNLGGA
VCRHHANEYRLYLDAYNMMISAGFSLWVYKQFDTYNLWNTFTRLQSLENVAFNVVNKGHFDGQQGEVPVSIINNTVYTKVD
GVDVELFENKTTLPVNVAFELWAKRNIKPVPEVKILNNLGVDIAANTVIWDYKRDAPAHISTIGVCSMTDIAKKPTETICAPLTVF
FDGRVDGQVDLFRNARNGVLITEGSVKGLQPSVGPKQASLNGVTLIGEAVKTQFNYYKKVDGVVQQLPETYFTQSRNLQEFKP
RSQMEIDFLELAMDEFIERYKLEGYAFEHIVYGDFSHSQLGGLHLLIGLAKRFKESPFELEDFIPMDSTVKNYFITDAQTGSSKCVC
SVIDLLLDDFVEIIKSQDLSVVSKVVKVTIDYTEISFMLWCKDGHVETFYPKLQSSQAWQPGVAMPNLYKMQRMLLEKCDLQN
YGDSATLPKGIMMNVAKYTQLCQYLNTLTLAVPYNMRVIHFGAGSDKGVAPGTAVLRQWLPTGTLLVDSDLNDFVSDADSTLI
GDCATVHTANKWDLIISDMYDPKTKNVTKENDSKEGFFTYICGFIQQKLALGGSVAIKITEHSWNADLYKLMGHFAWWTAFV
TNVNASSSEAFLIGCNYLGKPREQIDGYVMHANYIFWRNTNPIQLSSYSLFDMSKFPLKLRGTAVMSLKE
SEQ ID NO: 11
>Protein\S_2019-nCoV/Italy-INMI1 (Sprotein_hCoV19ItalyINMI1isl2020)(Genbank Acc. No: QIA98554)
MFVFLVLLPLVSSQCVNLTTRTQLPPAYTNSFTRGVYYPDKVFRSSVLHSTQDLFLPFFSNVTWFHAIHVSGTNGTKRFDNPVLP
FNDGVYFASTEKSNIIRGWIFGTTLDSKTQSLLIVNNATNVVIKVCEFQFCNDPFLGVYYHKNNKSWMESEFRVYSSANNCTFEY
VSQPFLMDLEGKQGNFKNLREFVFKNIDGYFKIYSKHTPINLVRDLPQGFSALEPLVDLPIGINITRFQTLLALHRSYLTPGDSSSG
WTAGAAAYYVGYLQPRTFLLKYNENGTITDAVDCALDPLSETKCTLKSFTVEKGIYQTSNFRVQPTESIVRFPNITNLCPFGEVFN
ATRFASVYAWNRKRISNCVADYSVLYNSASFSTFKCYGVSPTKLNDLCFTNVYADSFVIRGDEVRQIAPGQTGKIADYNYKLPDD
FTGCVIAWNSNNLDSKVGGNYNYLYRLFRKSNLKPFERDISTEIYQAGSTPCNGVEGFNCYFPLQSYGFQPTNGVGYQPYRVVV
LSFELLHAPATVCGPKKSTNLVKNKCVNFNFNGLTGTGVLTESNKKELPFQQFGRDIADTTDAVRDPQTLEILDITPCSFGGVSVI
TPGTNTSNQVAVLYQDVNCTEVPVAIHADQLTPTWRVYSTGSNVFQTRAGCLIGAEHVNNSYECDIPIGAGICASYQTQTNSP
RRARSVASQSIIAYTMSLGAENSVAYSNNSIAIPTNFTISVTTEILPVSMTKTSVDCTMYICGDSTECSNLLLQYGSFCTQLNRALT
GIAVEQDKNTQEVFAQVKQIYKTPPIKDFGGFNFSQILPDPSKPSKRSFIEDLLFNKVTLADAGFIKQYGDCLGDIAARDLICAQKF
NGLTVLPPLLTDEMIAQYTSALLAGTITSGWTFGAGAALQIPFAMQMAYRFNGIGVTQNVLYENQKLIANQFNSAIGKIQDSLS
STASALGKLQDVVNQNAQALNTLVKQLSSNFGAISSVLNDILSRLDKVEAEVQIDRLITGRLQSLQTYVTQQLIRAAEIRASANLA
ATKMSECVLGQSKRVDFCGKGYHLMSFPQSAPHGVVFLHVTYVPAQEKNFTTAPAICHDGKAHFPREGVFVSNGTHWFVTQ
RNFYEPQIITTDNTFVSGNCDVVIGIVNNTVYDPLQPELDSFKEELDKYFKNHTSPDVDLGDISGINASVVNIQKEIDRLNEVAKN
LNESLIDLQELGKYEQYIKWPWYIWLGFIAGLIAIVMVTIMLCCMTSCCSCLKGCCSCGSCCKFDEDDSEPVLKGVKLHYT
SEQ ID NO: 12
>hCoV-19/France/IDF0372-isl/2020|EPI_ISL_410720|2020-Jan.-23
ATTAAAGGTTTATACCTTCCCAGGTAACAAACCAACCAACTTTCGATCTCTTGTAGATCTGTTCTCTAAACGAACTTTAAAA
TCTGTGTGGCTGTCACTCGGCTGCATGCTTAGTGCACTCACGCAGTATAATTAATAACTAATTACTGTCGTTGACAGGACA
CGAGTAACTCGTCTATCTTCTGCAGGCTGCTTACGGTTTCGTCCGTGTTGCAGCCGATCATCAGCACATCTAGGTTTCGTCC
GGGTGTGACCGAAAGGTAAGATGGAGAGCCTTGTCCCTGGTTTCAACGAGAAAACACACGTCCAACTCAGTTTGCCTGTT
TTACAGGTTCGCGACGTGCTCGTACGTGGCTTTGGAGACTCCGTGGAGGAGGTCTTATCAGAGGCACGTCAACATCTTAA
AGATGGCACTTGTGGCTTAGTAGAAGTTGAAAAAGGCGTTTTGCCTCAACTTGAACAGCCCTATGTGTTCATCAAACGTTC
GGATGCTCGAACTGCACCTCATGGTCATGTTATGGTTGAGCTGGTAGCAGAACTCGAAGGCATTCAGTACGGTCGTAGTG
GTGAGACACTTGGTGTCCTTGTCCCTCATGTGGGCGAAATACCAGTGGCTTACCGCAAGGTTCTTCTTCGTAAGAACGGTA
ATAAAGGAGCTGGTGGCCATAGTTACGGCGCCGATCTAAAGTCATTTGACTTAGGCGACGAGCTTGGCACTGATCCTTAT
GAAGATTTTCAAGAAAACTGGAACACTAAACATAGCAGTGGTGTTACCCGTGAACTCATGCGTGAGCTTAACGGAGGGG
CATACACTCGCTATGTCGATAACAACTTCTGTGGCCCTGATGGCTACCCTCTTGAGTGCATTAAAGACCTTCTAGCACGTGC
TGGTAAAGCTTCATGCACTTTGTCCGAACAACTGGACTTTATTGACACTAAGAGGGGTGTATACTGCTGCCGTGAACATGA
GCATGAAATTGCTTGGTACACGGAACGTTCTGAAAAGAGCTATGAATTGCAGACACCTTTTGAAATTAAATTGGCAAAGA
AATTTGACACCTTCAATGGGGAATGTCCAAATTTTGTATTTCCCTTAAATTCCATAATCAAGACTATTCAACCAAGGGTTGA
AAAGAAAAAGCTTGATGGCTTTATGGGTAGAATTCGATCTGTCTATCCAGTTGCGTCACCAAATGAATGCAACCAAATGT
GCCTTTCAACTCTCATGAAGTGTGATCATTGTGGTGAAACTTCATGGCAGACGGGCGATTTTGTTAAAGCCACTTGCGAAT
TTTGTGGCACTGAGAATTTGACTAAAGAAGGTGCCACTACTTGTGGTTACTTACCCCAAAATGCTGTTGTTAAAATTTATTG
TCCAGCATGTCACAATTCAGAAGTAGGACCTGAGCATAGTCTTGCCGAATACCATAATGAATCTGGCTTGAAAACCATTCT
TCGTAAGGGTGGTCGCACTATTGCCTTTGGAGGCTGTGTGTTCTCTTATGTTGGTTGCCATAACAAGTGTGCCTATTGGGT
TCCACGTGCTAGCGCTAACATAGGTTGTAACCATACAGGTGTTGTTGGAGAAGGTTCCGAAGGTCTTAATGACAACCTTCT
TGAAATACTCCAAAAAGAGAAAGTCAACATCAATATTGTTGGTGACTTTAAACTTAATGAAGAGATCGCCATTATTTTGGC
ATCTTTTTCTGCTTCCACAAGTGCTTTTGTGGAAACTGTGAAAGGTTTGGATTATAAAGCATTCAAACAAATTGTTGAATCC
TGTGGTAATTTTAAAGTTACAAAAGGAAAAGCTAAAAAAGGTGCCTGGAATATTGGTGAACAGAAATCAATACTGAGTCC
TCTTTATGCATTTGCATCAGAGGCTGCTCGTGTTGTACGATCAATTTTCTCCCGCACTCTTGAAACTGCTCAAAATTCTGTGC
GTGTTTTACAGAAGGCCGCTATAACAATACTAGATGGAATTTCACAGTATTCACTGAGACTCATTGATGCTATGATGTTCA
CATCTGATTTGGCTACTAACAATCTAGTTGTAATGGCCTACATTACAGGTGGTGTTGTTCAGTTGACTTCGCAGTGGCTAA
CTAACATCTTTGGCACTGTTTATGAAAAACTCAAACCCGTCCTTGATTGGCTTGAAGAGAAGTTTAAGGAAGGTGTAGAGT
TTCTTAGAGACGGTTGGGAAATTGTTAAATTTATCTCAACCTGTGCTTGTGAAATTGTCGGTGGACAAATTGTCACCTGTG
CAAAGGAAATTAAGGAGAGTGTTCAGACATTCTTTAAGCTTGTAAATAAATTTTTGGCTTTGTGTGCTGACTCTATCATTAT
TGGTGGAGCTAAACTTAAAGCCTTGAATTTAGGTGAAACATTTGTCACGCACTCAAAGGGATTGTACAGAAAGTGTGTTA
AATCCAGAGAAGAAACTGGCCTACTCATGCCTCTAAAAGCCCCAAAAGAAATTATCTTCTTAGAGGGAGAAACACTTCCCA
CAGAAGTGTTAACAGAGGAAGTTGTCTTGAAAACTGGTGATTTACAACCATTAGAACAACCTACTAGTGAAGCTGTTGAA
GCTCCATTGGTTGGTACACCAGTTTGTATTAACGGGCTTATGTTGCTCGAAATCAAAGACACAGAAAAGTACTGTGCCCTT
GCACCTAATATGATGGTAACAAACAATACCTTCACACTCAAAGGCGGTGCACCAACAAAGGTTACTTTTGGTGATGACACT
GTGATAGAAGTGCAAGGTTACAAGAGTGTGAATATCACTTTTGAACTTGATGAAAGGATTGATAAAGTACTTAATGAGAA
GTGCTCTGCCTATACAGTTGAACTCGGTACAGAAGTAAATGAGTTCGCCTGTGTTGTGGCAGATGCTGTCATAAAAACTTT
GCAACCAGTATCTGAATTACTTACACCACTGGGCATTGATTTAGATGAGTGGAGTATGGCTACATACTACTTATTTGATGA
GTCTGGTGAGTTTAAATTGGCTTCACATATGTATTGTTCTTTCTACCCTCCAGATGAGGATGAAGAAGAAGGTGATTGTGA
AGAAGAAGAGTTTGAGCCATCAACTCAATATGAGTATGGTACTGAAGATGATTACCAAGGTAAACCTTTGGAATTTGGTG
CCACTTCTGCTGCTCTTCAACCTGAAGAAGAGCAAGAAGAAGATTGGTTAGATGATGATAGTCAACAAACTGTTGGTCAA
CAAGACGGCAGTGAGGACAATCAGACAACTACTATTCAAACAATTGTTGAGGTTCAACCTCAATTAGAGATGGAACTTAC
ACCAGTTGTTCAGACTATTGAAGTGAATAGTTTTAGTGGTTATTTAAAACTTACTGACAATGTATACATTAAAAATGCAGA
CATTGTGGAAGAAGCTAAAAAGGTAAAACCAACAGTGGTTGTTAATGCAGCCAATGTTTACCTTAAACATGGAGGAGGT
GTTGCAGGAGCCTTAAATAAGGCTACTAACAATGCCATGCAAGTTGAATCTGATGATTACATAGCTACTAATGGACCACTT
AAAGTGGGTGGTAGTTGTGTTTTAAGCGGACACAATCTTGCTAAACACTGTCTTCATGTTGTCGGCCCAAATGTTAACAAA
GGTGAAGACATTCAACTTCTTAAGAGTGCTTATGAAAATTTTAATCAGCACGAAGTTCTACTTGCACCATTATTATCAGCTG
GTATTTTTGGTGCTGACCCTATACATTCTTTAAGAGTTTGTGTAGATACTGTTCGCACAAATGTCTACTTAGCTGTCTTTGAT
AAAAATCTCTATGACAAACTTGTTTCAAGCTTTTTGGAAATGAAGAGTGAAAAGCAAGTTGAACAAAAGATCGCTGAGAT
TCCTAAAGAGGAAGTTAAGCCATTTATAACTGAAAGTAAACCTTCAGTTGAACAGAGAAAACAAGATGATAAGAAAATCA
AAGCTTGTGTTGAAGAAGTTACAACAACTCTGGAAGAAACTAAGTTCCTCACAGAAAACTTGTTACTTTATATTGACATTA
ATGGCAATCTTCATCCAGATTCTGCCACTCTTGTTAGTGACATTGACATCACTTTCTTAAAGAAAGATGCTCCATATATAGT
GGGTGATGTTGTTCAAGAGGGTGTTTTAACTGCTGTGGTTATACCTACTAAAAAGGCTGGTGGCACTACTGAAATGCTAG
CGAAAGCTTTGAGAAAAGTGCCAACAGACAATTATATAACCACTTACCCGGGTCAGGGTTTAAATGGTTACACTGTAGAG
GAGGCAAAGACAGTGCTTAAAAAGTGTAAAAGTGCCTTTTACATTCTACCATCTATTATCTCTAATGAGAAGCAAGAAATT
CTTGGAACTGTTTCTTGGAATTTGCGAGAAATGCTTGCACATGCAGAAGAAACACGCAAATTAATGCCTGTCTGTGTGGA
AACTAAAGCCATAGTTTCAACTATACAGCGTAAATATAAGGGTATTAAAATACAAGAGGGTGTGGTTGATTATGGTGCTA
GATTTTACTTTTACACCAGTAAAACAACTGTAGCGTCACTTATCAACACACTTAACGATCTAAATGAAACTCTTGTTACAAT
GCCACTTGGCTATGTAACACATGGCTTAAATTTGGAAGAAGCTGCTCGGTATATGAGATCTCTCAAAGTGCCAGCTACAGT
TTCTGTTTCTTCACCTGATGCTGTTACAGCGTATAATGGTTATCTTACTTCTTCTTCTAAAACACCTGAAGAACATTTTATTG
AAACCATCTCACTTGCTGGTTCCTATAAAGATTGGTCCTATTCTGGACAATCTACACAACTAGGTATAGAATTTCTTAAGAG
AGGTGATAAAAGTGTATATTACACTAGTAATCCTACCACATTCCACCTAGATGGTGAAGTTATCACCTTTGACAATCTTAAG
ACACTTCTTTCTTTGAGAGAAGTGAGGACTATTAAGGTGTTTACAACAGTAGACAACATTAACCTCCACACGCAAGTTGTG
GACATGTCAATGACATATGGACAACAGTTTGGTCCAACTTATTTGGATGGAGCTGATGTTACTAAAATAAAACCTCATAAT
TCACATGAAGGTAAAACATTTTATGTTTTACCTAATGATGACACTCTACGTGTTGAGGCTTTTGAGTACTACCACACAACTG
ATCCTAGTTTTCTGGGTAGGTACATGTCAGCATTAAATCACACTAAAAAGTGGAAATACCCACAAGTTAATGGTTTAACTT
CTATTAAATGGGCAGATAACAACTGTTATCTTGCCACTGCATTGTTAACACTCCAACAAATAGAGTTGAAGTTTAATCCACC
TGCTCTACAAGATGCTTATTACAGAGCAAGGGCTGGTGAAGCTGCTAACTTTTGTGCACTTATCTTAGCCTACTGTAATAA
GACAGTAGGTGAGTTAGGTGATGTTAGAGAAACAATGAGTTACTTGTTTCAACATGCCAATTTAGATTCTTGCAAAAGAG
TCTTGAACGTGGTGTGTAAAACTTGTGGACAACAGCAGACAACCCTTAAGGGTGTAGAAGCTGTTATGTACATGGGCACA
CTTTCTTATGAACAATTTAAGAAAGGTGTTCAGATACCTTGTACGTGTGGTAAACAAGCTACAAAATATCTAGTACAACAG
GAGTCACCTTTTGTTATGATGTCAGCACCACCTGCTCAGTATGAACTTAAGCATGGTACATTTACTTGTGCTAGTGAGTACA
CTGGTAATTACCAGTGTGGTCACTATAAACATATAACTTCTAAAGAAACTTTGTATTGCATAGACGGTGCTTTACTTACAAA
GTCCTCAGAATACAAAGGTCCTATTACGGATGTTTTCTACAAAGAAAACAGTTACACAACAACCATAAAACCAGTTACTTA
TAAATTGGATGGTGTTGTTTGTACAGAAATTGACCCTAAGTTGGACAATTATTATAAGAAAGACAATTCTTATTTCACAGA
GCAACCAATTGATCTTGTACCAAACCAACCATATCCAAACGCAAGCTTCGATAATTTTAAGTTTGTATGTGATAATATCAAA
TTTGCTGATGATTTAAACCAGTTAACTGGTTATAAGAAACCTGCTTCAAGAGAGCTTAAAGTTACATTTTTCCCTGACTTAA
ATGGTGATGTGGTGGCTATTGATTATAAACACTACACACCCTCTTTTAAGAAAGGAGCTAAATTGTTACATAAACCTATTG
TTTGGCATGTTAACAATGCAACTAATAAAGCCACGTATAAACCAAATACCTGGTGTATACGTTGTCTTTGGAGCACAAAAC
CAGTTGAAACATCAAATTCGTTTGATGTACTGAAGTCAGAGGACGCGCAGGGAATGGATAATCTTGCCTGCGAAGATCTA
AAACCAGTCTCTGAAGAAGTAGTGGAAAATCCTACCATACAGAAAGACGTTCTTGAGTGTAATGTGAAAACTACCGAAGT
TGTAGGAGACATTATACTTAAACCAGCAAATAATAGTTTAAAAATTACAGAAGAGGTTGGCCACACAGATCTAATGGCTG
CTTATGTAGACAATTCTAGTCTTACTATTAAGAAACCTAATGAATTATCTAGAGTATTAGGTTTGAAAACCCTTGCTACTCA
TGGTTTAGCTGCTGTTAATAGTGTCCCTTGGGATACTATAGCTAATTATGCTAAGCCTTTTCTTAACAAAGTTGTTAGTACA
ACTACTAACATAGTTACACGGTGTTTAAACCGTGTTTGTACTAATTATATGCCTTATTTCTTTACTTTATTGCTACAATTGTG
TACTTTTACTAGAAGTACAAATTCTAGAATTAAAGCATCTATGCCGACTACTATAGCAAAGAATACTGTTAAGAGTGTCGG
TAAATTTTGTCTAGAGGCTTCATTTAATTATTTGAAGTCACCTAATTTTTCTAAACTGATAAATATTATAATTTGGTTTTTACT
ATTAAGTGTTTGCCTAGGTTCTTTAATCTACTCAACCGCTGCTTTAGGTGTTTTAATGTCTAATTTAGGCATGCCTTCTTACT
GTACTGGTTACAGAGAAGGCTATTTGAACTCTACTAATGTCACTATTGCAACCTACTGTACTGGTTCTATACCTTGTAGTGT
TTGTCTTAGTGGTTTAGATTCTTTAGACACCTATCCTTCTTTAGAAACTATACAAATTACCATTTCATCTTTTAAATGGGATTT
AACTGCTTTTGGCTTAGTTGCAGAGTGGTTTTTGGCATATATTCTTTTCACTAGGTTTTTCTATGTACTTGGATTGGCTGCAA
TCATGCAATTGTTTTTCAGCTATTTTGCAGTACATTTTATTAGTAATTCTTGGCTTATGTGGTTAATAATTAATCTTGTACAA
ATGGCCCCGATTTCAGCTATGGTTAGAATGTACATCTTCTTTGCATCATTTTATTATGTATGGAAAAGTTATGTGCATGTTG
TAGACGGTTGTAATTCATCAACTTGTATGATGTGTTACAAACGTAATAGAGCAACAAGAGTCGAATGTACAACTATTGTTA
ATGGTGTTAGAAGGTCCTTTTATGTCTATGCTAATGGAGGTAAAGGCTTTTGCAAACTACACAATTGGAATTGTGTTAATT
GTGATACATTCTGTGCTGGTAGTACATTTATTAGTGATGAAGTTGCGAGAGACTTGTCACTACAGTTTAAAAGACCAATAA
ATCCTACTGACCAGTCTTCTTACATCGTTGATAGTGTTACAGTGAAGAATGGTTCCATCCATCTTTACTTTGATAAAGCTGG
TCAAAAGACTTATGAAAGACATTCTCTCTCTCATTTTGTTAACTTAGACAACCTGAGAGCTAATAACACTAAAGGTTCATTG
CCTATTAATGTTATAGTTTTTGATGGTAAATCAAAATGTGAAGAATCATCTGCAAAATCAGCGTCTGTTTACTACAGTCAGC
TTATGTGTCAACCTATACTGTTACTAGATCAGGCATTAGTGTCTGATGTTGGTGATAGTGCGGAAGTTGCAGTTAAAATGT
TTGATGCTTACGTTAATACGTTTTCATCAACTTTTAACGTACCAATGGAAAAACTCAAAACACTAGTTGCAACTGCAGAAGC
TGAACTTGCAAAGAATGTGTCCTTAGACAATGTCTTATCTACTTTTATTTCAGCAGCTCGGCAAGGGTTTGTTGATTCAGAT
GTAGAAACTAAAGATGTTGTTGAATGTCTTAAATTGTCACATCAATCTGACATAGAAGTTACTGGCGATAGTTGTAATAAC
TATATGCTCACCTATAACAAAGTTGAAAACATGACACCCCGTGACCTTGGTGCTTGTATTGACTGTAGTGCGCGTCATATT
AATGCGCAGGTAGCAAAAAGTCACAACATTGCTTTGATATGGAACGTTAAAGATTTCATGTCATTGTCTGAACAACTACGA
AAACAAATACGTAGTGCTGCTAAAAAGAATAACTTACCTTTTAAGTTGACATGTGCAACTACTAGACAAGTTGTTAATGTT
GTAACAACAAAGATAGCACTTAAGGGTGGTAAAATTGTTAATAATTGGTTGAAGCAGTTAATTAAAGTTACACTTGTGTTC
CTTTTTGTTGCTGCTATTTTCTATTTAATAACACCTGTTCATGTCATGTCTAAACATACTGACTTTTCAAGTGAAATCATAGG
ATACAAGGCTATTGATGGTGGTGTCACTCGTGACATAGCATCTACAGATACTTGTTTTGCTAACAAACATGCTGATTTTGÅ
CACATGGTTTAGCCAGCGTGGTGGTAGTTATACTAATGACAAAGCTTGCCCATTGATTGCTGCAGTCATAACAAGAGAAG
TGGGTTTTGTCGTGCCTGGTTTGCCTGGCACGATATTACGCACAACTAATGGTGACTTTTTGCATTTCTTACCTAGAGTTTT
TAGTGCAGTTGGTAACATCTGTTACACACCATCAAAACTTATAGAGTACACTGACTTTGCAACATCAGCTTGTGTTTTGGCT
GCTGAATGTACAATTTTTAAAGATGCTTCTGGTAAGCCAGTACCATATTGTTATGATACCAATGTACTAGAAGGTTCTGTTG
CTTATGAAAGTTTACGCCCTGACACACGTTATGTGCTCATGGATGGCTCTATTATTCAATTTCCTAACACCTACCTTGAAGG
TTCTGTTAGAGTGGTAACAACTTTTGATTCTGAGTACTGTAGGCACGGCACTTGTGAAAGATCAGAAGCTGGTGTTTGTGT
ATCTACTAGTGGTAGATGGGTACTTAACAATGATTATTACAGATCTTTACCAGGAGTTTTCTGTGGTGTAGATGCTGTAAA
TTTACTTACTAATATGTTTACACCACTAATTCAACCTATTGGTGCTTTGGACATATCAGCATCTATAGTAGCTGGTGGTATT
GTAGCTATCGTAGTAACATGCCTTGCCTACTATTTTATGAGGTTTAGAAGAGCTTTTGGTGAATACAGTCATGTAGTTGCCT
TTAATACTTTACTATTCCTTATGTCATTCACTGTACTCTGTTTAACACCAGTTTACTCATTCTTACCTGGTGTTTATTCTGTTAT
TTACTTGTACTTGACATTTTATCTTACTAATGATGTTTCTTTTTTAGCACATATTCAGTGGATGGTTATGTTCACACCTTTAGT
ACCTTTCTGGATAACAATTGCTTATATCATTTGTATTTCCACAAAGCATTTCTATTGGTTCTTTAGTAATTACCTAAAGAGAC
GTGTAGTCTTTAATGGTGTTTCCTTTAGTACTTTTGAAGAAGCTGCGCTGTGCACCTTTTTGTTAAATAAAGAAATGTATCT
AAAGTTGCGTAGTGATGTGCTATTACCTCTTACGCAATATAATAGATACTTAGCTCTTTATAATAAGTACAAGTATTTTAGT
GGAGCAATGGATACAACTAGCTACAGAGAAGCTGCTTGTTGTCATCTCGCAAAGGCTCTCAATGACTTCAGTAACTCAGG
TTCTGATGTTCTTTACCAACCACCACAAACCTCTATCACCTCAGCTGTTTTGCAGAGTGGTTTTAGAAAAATGGCATTCCCA
TCTGGTAAAGTTGAGGGTTGTATGGTACAAGTAACTTGTGGTACAACTACACTTAACGGTCTTTGGCTTGATGACGTAGTT
TACTGTCCAAGACATGTGATCTGCACCTCTGAAGACATGCTTAACCCTAATTATGAAGATTTACTCATTCGTAAGTCTAATC
ATAATTTCTTGGTACAGGCTGGTAATGTTCAACTCAGGGTTATTGGACATTCTATGCAAAATTGTGTACTTAAGCTTAAGG
TTGATACAGCCAATCCTAAGACACCTAAGTATAAGTTTGTTCGCATTCAACCAGGACAGACTTTTTCAGTGTTAGCTTGTTÅ
CAATGGTTCACCATCTGGTGTTTACCAATGTGCTATGAGGCCCAATTTCACTATTAAGGGTTCATTCCTTAATGGTTCATGT
GGTÅGTGTTGGTTTTAACATAGATTATGACTGTGTCTCTTTTTGTTACATGCACCATATGGAATTACCAACTGGAGTTCATG
CTGGCACAGACTTAGAAGGTAACTTTTATGGACCTTTTGTTGACAGGCAAACAGCACAAGCAGCTGGTACGGACACAACT
ATTACAGTTAATGTTTTAGCTTGGTTGTACGCTGCTGTTATAAATGGAGACAGGTGGTTTCTCAATCGATTTACCACAACTC
TTAATGACTTTAACCTTGTGGCTATGAAGTACAATTATGAACCTCTAACACAAGACCATGTTGACATACTAGGACCTCTTTC
TGCTCAAACTGGAATTGCCGTTTTAGATATGTGTGCTTCATTAAAAGAATTACTGCAAAATGGTATGAATGGACGTACCAT
ATTGGGTAGTGCTTTATTAGAAGATGAATTTACACCTTTTGATGTTGTTAGACAATGCTCAGGTGTTACTTTCCAAAGTGCA
GTGAAAAGAACAATCAAGGGTACACACCACTGGTTGTTACTCACAATTTTGACTTCACTTTTAGTTTTAGTCCAGAGTACTC
AATGGTCTTTGTTCTTTTTTTTGTATGAAAATGCCTTTTTACCTTTTGCTATGGGTATTATTGCTATGTCTGCTTTTGCAATGA
TGTTTGTCAAACATAAGCATGCATTTCTCTGTTTGTTTTTGTTACCTTCTCTTGCCACTGTAGCTTATTTTAATATGGTCTATA
TGCCTGCTAGTTGGGTGATGCGTATTATGACATGGTTGGATATGGTTGATACTAGTTTGTCTGGTTTTAAGCTAAAAGACT
GTGTTATGTATGCATCAGCTGTAGTGTTACTAATCCTTATGACAGCAAGAACTGTGTATGATGATGGTGCTAGGAGAGTG
TGGACACTTATGAATGTCTTGACACTCGTTTATAAAGTTTATTATGGTAATGCTTTAGATCAAGCCATTTCCATGTGGGCTC
TTATAATCTCTGTTACTTCTAACTACTCAGGTGTAGTTACAACTGTCATGTTTTTGGCCAGAGGTATTGTTTTTATGTGTGTT
GAGTATTGCCCTATTTTCTTCATAACTGGTAATACACTTCAGTGTATAATGCTAGTTTATTGTTTCTTAGGCTATTTTTGTACT
TGTTACTTTGGCCTCTTTTGTTTACTCAACCGCTACTTTAGACTGACTCTTGGTGTTTATGATTACTTAGTTTCTACACAGGA
GTTTAGATATATGAATTCACAGGGACTACTCCCACCCAAGAATAGCATAGATGCCTTCAAACTCAACATTAAATTGTTGGG
TGTTGGTGGCAAACCTTGTATCAAAGTAGCCACTGTACAGTCTAAAATGTCAGATGTAAAGTGCACATCAGTAGTCTTACT
CTCAGTTTTGCAACAACTCAGAGTAGAATCATCATCTAAATTGTGGGCTCAATGTGTCCAGTTACACAATGACATTCTCTTA
GCTAAAGATACTACTGAAGCCTTTGAAAAAATGGTTTCACTACTTTCTGTTTTGCTTTCCATGCAGGGTGCTGTAGACATAA
ACAAGCTTTGTGAAGAAATGCTGGACAACAGGGCAACCTTACAAGCTATAGCCTCAGAGTTTAGTTCCCTTCCATCATATG
CAGCTTTTGCTACTGCTCAAGAAGCTTATGAGCAGGCTGTTGCTAATGGTGATTCTGAAGTTGTTCTTAAAAAGTTGAAGA
AGTCTTTGAATGTGGCTAAATCTGAATTTGACCGTGATGCAGCCATGCAACGTAAGTTGGAAAAGATGGCTGATCAAGCT
ATGACCCAAATGTATAAACAGGCTAGATCTGAGGACAAGAGGGCAAAAGTTACTAGTGCTATGCAGACAATGCTTTTCAC
TATGCTTAGAAAGTTGGATAATGATGCACTCAACAACATTATCAACAATGCAAGAGATGGTTGTGTTCCCTTGAACATAAT
ACCTCTTACAACAGCAGCCAAACTAATGGTTGTCATACCAGACTATAACACATATAAAAATACGTGTGATGGTACAACATT
TACTTATGCATCAGCATTGTGGGAAATCCAACAGGTTGTAGATGCAGATAGTAAAATTGTTCAACTTAGTGAAATTAGTAT
GGACAATTCACCTAATTTAGCATGGCCTCTTATTGTAACAGCTTTAAGGGCCAATTCTGCTGTCAAATTACAGAATAATGA
GCTTAGTCCTGTTGCACTACGACAGATGTCTTGTGCTGCCGGTACTACACAAACTGCTTGCACTGATGACAATGCGTTAGC
TTACTACAACACAACAAAGGGAGGTAGGTTTGTACTTGCACTGTTATCCGATTTACAGGATTTGAAATGGGCTAGATTCCC
TAAGAGTGATGGAACTGGTACTATCTATACAGAACTGGAACCACCTTGTAGGTTTGTTACAGACACACCTAAAGGTCCTAA
AGTGAAGTATTTATACTTTATTAAAGGATTAAACAACCTAAATAGAGGTATGGTACTTGGTAGTTTAGCTGCCACAGTACG
TCTACAAGCTGGTAATGCAACAGAAGTGCCTGCCAATTCAACTGTATTATCTTTCTGTGCTTTTGCTGTAGATGCTGCTAAA
GCTTACAAAGATTATCTAGCTAGTGGGGGACAACCAATCACTAATTGTGTTAAGATGTTGTGTACACACACTGGTACTGGT
CAGGCAATAACAGTTACACCGGAAGCCAATATGGATCAAGAATCCTTTGGTGGTGCATCGTGTTGTCTGTACTGCCGTTGC
CACATAGATCATCCAAATCCTAAAGGATTTTGTGACTTAAAAGGTAAGTATGTACAAATACCTACAACTTGTGCTAATGAC
CCTGTGGGTTTTACACTTAAAAACACAGTCTGTACCGTCTGCGGTATGTGGAAAGGTTATGGCTGTAGTTGTGATCAACTC
CGCGAACCCATGCTTCAGTCAGCTGATGCACAATCGTTTTTAAACGGGTTTGCGGTGTAAGTGCAGCCCGTCTTACACCGT
GCGGCACAGGCACTAGTACTGATGTCGTATACAGGGCTTTTGACATCTACAATGATAAAGTAGCTGGTTTTGCTAAATTCC
TAAAAACTAATTGTTGTCGCTTCCAAGAAAAGGACGAAGATGACAATTTAATTGATTCTTACTTTGTAGTTAAGAGACACA
CTTTCTCTAACTACCAACATGAAGAAACAATTTATAATTTACTTAAGGATTGTCCAGCTGTTGCTAAACATGACTTCTTTAA
GTTTAGAATAGACGGTGACATGGTACCACATATATCACGTCAACGTCTTACTAAATACACAATGGCAGACCTCGTCTATGC
TTTAAGGCATTTTGATGAAGGTAATTGTGACACATTAAAAGAAATACTTGTCACATACAATTGTTGTGATGATGATTATTTC
AATAAAAAGGACTGGTATGATTTTGTAGAAAACCCAGATATATTACGCGTATACGCCAACTTAGGTGAACGTGTACGCCA
AGCTTTGTTAAAAACAGTACAATTCTGTGATGCCATGCGAAATGCTGGTATTGTTGGTGTACTGACATTAGATAATCAAGA
TCTCAATGGTAACTGGTATGATTTCGGTGATTTCATACAAACCACGCCAGGTAGTGGAGTTCCTGTTGTAGATTCTTATTAT
TCATTGTTAATGCCTATATTAACCTTGACCAGGGCTTTAACTGCAGAGTCACATGTTGACACTGACTTAACAAAGCCTTACA
TTAAGTGGGATTTGTTAAAATATGACTTCACGGAAGAGAGGTTAAAACTCTTTGACCGTTATTTTAAATATTGGGATCAGA
CATACCACCCAAATTGTGTTAACTGTTTGGATGACAGATGCATTCTGCATTGTGCAAACTTTAATGTTTTATTCTCTACAGT
GTTCCCACCTACAAGTTTTGGACCACTAGTGAGAAAAATATTTGTTGATGGTGTTCCATTTGTAGTTTCAACTGGATACCAC
TTCAGAGAGCTAGGTGTTGTACATAATCAGGATGTAAACTTACATAGCTCTAGACTTAGTTTTAAGGAATTACTTGTGTAT
GCTGCTGACCCTGCTATGCACGCTGCTTCTGGTAATCTATTACTAGATAAACGCACTACGTGCTTTTCAGTAGCTGCACTTA
CTAACAATGTTGCTTTTCAAACTGTCAAACCCGGTAATTTTAACAAAGACTTCTATGACTTTGCTGTGTCTAAGGGTTTCTTT
AAGGAAGGAAGTTCTGTTGAATTAAAACACTTCTTCTTTGCTCAGGATGGTAATGCTGCTATCAGCGATTATGACTACTAT
CGTTATAATCTACCAACAATGTGTGATATCAGACAACTACTATTTGTAGTTGAAGTTGTTGATAAGTACTTTGATTGTTACG
ATGGTGGCTGTATTAATGCTAACCAAGTCATCGTCAACAACCTAGACAAATCAGCTGGTTTTCCATTTAATAAATGGGGTA
AGGCTAGACTTTATTATGATTCAATGAGTTATGAGGATCAAGATGCACTTTTCGCATATACAAAACGTAATGTCATCCCTAC
TATAACTCAAATGAATCTTAAGTATGCCATTAGTGCAAAGAATAGAGCTCGCACCGTAGCTGGTGTCTCTATCTGTAGTAC
TATGACCAATAGACAGTTTCATCAAAAATTATTGAAATCAATAGCCGCCACTAGAGGAGCTACTGTAGTAATTGGAACAA
GCAAATTCTATGGTGGTTGGCACAACATGTTAAAAACTGTTTATAGTGATGTAGAAAACCCTCACCTTATGGGTTGGGATT
ATCCTAAATGTGATAGAGCCATGCCTAACATGCTTAGAATTATGGCCTCACTTGTTCTTGCTCGCAAACATACAACGTGTTG
TAGCTTGTCACACCGTTTCTATAGATTAGCTAATGAGTGTGCTCAAGTATTGAGTGAAATGGTCATGTGTGGCGGTTCACT
ATATGTTAAACCAGGTGGAACCTCATCAGGAGATGCCACAACTGCTTATGCTAATAGTGTTTTTAACATTTGTCAAGCTGT
CACGGCCAATGTTAATGCACTTTTATCTACTGATGGTAACAAAATTGCCGATAAGTATGTCCGCAATTTACAACACAGACTT
TATGAGTGTCTCTATAGAAATAGAGATGTTGACACAGACTTTGTGAATGAGTTTTACGCATATTTGCGTAAACATTTCTCAA
TGATGATACTCTCTGACGATGCTGTTGTGTGTTTCAATAGCACTTATGCATCTCAAGGTCTAGTGGCTAGCATAAAGAACT
TTAAGTCAGTTCTTTATTATCAAAACAATGTTTTTATGTCTGAAGCAAAATGTTGGACTGAGACTGACCTTACTAAAGGACC
TCATGAATTTTGCTCTCAACATACAATGCTAGTTAAACAGGGTGATGATTATGTGTACCTTCCTTACCCAGATCCATCAAGA
ATCCTAGGGGCCGGCTGTTTTGTAGATGATATCGTAAAAACAGATGGTACACTTATGATTGAACGGTTCGTGTCTTTAGCT
ATAGATGCTTACCCACTTACTAAACATCCTAATCAGGAGTATGCTGATGTCTTTCATTTGTACTTACAATACATAAGAAAGC
TACATGATGAGTTAACAGGACACATGTTAGACATGTATTCTGTTATGCTTACTAATGATAACACTTCAAGGTATTGGGAAC
CTGAGTTTTATGAGGCTATGTACACACCGCATACAGTCTTACAGGCTGTTGGGGCTTGTGTTCTTTGCAATTCACAGACTTC
ATTAAGATGTGGTGCTTGCATACGTAGACCATTCTTATGTTGTAAATGCTGTTACGACCATGTCATATCAACATCACATAAA
TTAGTCTTGTCTGTTAATCCGTATGTTTGCAATGCTCCAGGTTGTGATGTCACAGATGTGACTCAACTTTACTTAGGAGGTA
TGAGCTATTATTGTAAATCACATAAACCACCCATTAGTTTTCCATTGTGTGCTAATGGACAAGTTTTTGGTTTATATAAAAA
TACATGTGTTGGTAGCGATAATGTTACTGACTTTAATGCAATTGCAACATGTGACTGGACAAATGCTGGTGATTACATTTT
AGCTAACACCTGTACTGAAAGACTCAAGCTTTTTGCAGCAGAAACGCTCAAAGCTACTGAGGAGACATTTAAACTGTCTTA
TGGTATTGCTACTGTACGTGAAGTGCTGTCTGACAGAGAATTACATCTTTCATGGGAAGTTGGTAAACCTAGACCACCACT
TAACCGAAATTATGTCTTTACTGGTTATCGTGTAACTAAAAACAGTAAAGTACAAATAGGAGAGTACACCTTTGAAAAAGG
TGACTATGGTGATGCTGTTGTTTACCGAGGTACAACAACTTACAAATTAAATGTTGGTGATTATTTTGTGCTGACATCACAT
ACAGTAATGCCATTAAGTGCACCTACACTAGTGCCACAAGAGCACTATGTTAGAATTACTGGCTTATACCCAACACTCAAT
ATCTCAGATGAGTTTTCTAGCAATGTTGCAAATTATCAAAAGGTTGGTATGCAAAAGTATTCTACACTCCAGGGACCACCT
GGTACTGGTAAGAGTCATTTTGCTATTGGCCTAGCTCTCTACTACCCTTCTGCTCGCATAGTGTATACAGCTTGCTCTCATG
CCGCTGTTGATGCACTATGTGAGAAGGCATTAAAATATTTGCCTATAGATAAATGTAGTAGAATTATACCTGCACGTGCTC
GTGTAGAGTGTTTTGATAAATTCAAAGTGAATTCAACATTAGAACAGTATGTCTTTTGTACTGTAAATGCATTGCCTGAGA
CGACAGCAGATATAGTTGTCTTTGATGAAATTTCAATGGCCACAAATTATGATTTGAGTGTTGTCAATGCCAGATTACGTG
CTAAGCACTATGTGTACATTGGCGACCCTGCTCAATTACCTGCACCACGCACATTGCTAACTAAGGGCACACTAGAACCAG
AATATTTCAATTCAGTGTGTAGACTTATGAAAACTATAGGTCCAGACATGTTCCTCGGAACTTGTCGGCGTTGTCCTGCTG
AAATTGTTGACACTGTGÅGTGCTTTGGTTTATGATAATAAGCTTAAAGCACATAAAGACAAATCAGCTCAATGCTTTAAAA
TGTTTTATAAGGGTGTTATCACGCATGATGTTTCATCTGCAATTAACAGGCCACAAATAGGCGTGGTAAGAGAATTCCTTA
CACGTAACCCTGCTTGGAGAAAAGCTGTCTTTATTTCACCTTATAATTCACAGAATGCTGTAGCCTCAAAGATTTTGGGACT
ACCAACTCAAACTGTTGATTCATCACAGGGCTCAGAATATGACTATGTCATATTCACTCAAACCACTGAAACAGCTCACTCT
TGTAATGTAAACAGATTTAATGTTGCTATTACCAGAGCAAAAGTAGGCATACTTTGCATAATGTCTGATAGAGACCTTTAT
GACAAGTTGCAATTTACAAGTCTTGAAATTCCACGTAGGAATGTGGCAACTTTACAAGCTGAAAATGTAACAGGACTCTTT
AAAGATTGTAGTAAGGTAATCACTGGGTTACATCCTACACAGGCACCTACACACCTCAGTGTTGACACTAAATTCAAAACT
GAAGGTTTATGTGTTGACATACCTGGCATACCTAAGGACATGACCTATAGAAGACTCATCTCTATGATGGGTTTTAAAATG
AATTATCAAGTTAATGGTTACCCTAACATGTTTATCACCCGCGAAGAAGCTATAAGACATGTACGTGCATGGATTGGCTTC
GATGTCGAGGGGTGTCATGCTACTAGAGAAGCTGTTGGTACCAATTTACCTTTACAGCTAGGTTTTTCTACAGGTGTTAAC
CTAGTTGCTGTACCTACAGGTTATGTTGATACACCTAATAATACAGATTTTTCCAGAGTTAGTGCTAAACCACCGCCTGGA
GATCAATTTAAACACCTCATACCACTTATGTACAAAGGACTTCCTTGGAATGTAGTGCGTATAAAGATTGTACAAATGTTA
AGTGACACACTTAAAAATCTCTCTGACAGAGTCGTATTTGTCTTATGGGCACATGGCTTTGAGTTGACATCTATGAAGTATT
TTGTGAAAATAGGACCTGAGCGCACCTGTTGTCTATGTGATAGACGTGCCACATGCTTTTCCACTGCTTCAGACACTTATG
CCTGTTGGCATCATTCTATTGGATTTGATTACGTCTATAATCCGTTTATGATTGATGTTCAACAATGGGGTTTTACAGGTAA
CCTACAAAGCAACCATGATCTGTATTGTCAAGTCCATGGTAATGCACATGTAGCTAGTTGTGATGCAATCATGACTAGGTG
TCTAGCTGTCCACGAGTGCTTTGTTAAGCGTGTTGACTGGACTATTGAATATCCTATAATTGGTGATGAACTGAAGATTAA
TGCGGCTTGTAGAAAGGTTCAACACATGGTTGTTAAAGCTGCATTATTAGCAGACAAATTCCCAGTTCTTCACGACATTGG
TAACCCTAAAGCTATTAAGTGTGTACCTCAAGCTGATGTAGAATGGAAGTTCTATGATGCACAGCCTTGTAGTGACAAAGC
TTATAAAATAGAAGAATTATTCTATTCTTATGCCACACATTCTGACAAATTCACAGATGGTGTATGCCTATTTTGGAATTGC
AATGTCGATAGATATCCTGCTAATTCCATTGTTTGTAGATTTGACACTAGAGTGCTATCTAACCTTAACTTGCCTGGTTGTG
ATGGTGGCAGTTTGTATGTAAATAAACATGCATTCCACACACCAGCTTTTGATAAAAGTGCTTTTGTTAATTTAAAACAATT
ACCATTTTTCTATTACTCTGACAGTCCATGTGAGTCTCATGGAAAACAAGTAGTGTCAGATATAGATTATGTACCACTAAAG
TCTGCTACGTGTATAACACGTTGCAATTTAGGTGGTGCTGTCTGTAGACATCATGCTAATGAGTACAGATTGTATCTCGAT
GCTTATAACATGATGATCTCAGCTGGCTTTAGCTTGTGGGTTTACAAACAATTTGATACTTATAACCTCTGGAACACTTTTA
CAAGACTTCAGAGTTTAGAAAATGTGGCTTTTAATGTTGTAAATAAGGGACACTTTGATGGACAACAGGGTGAAGTACCA
GTTTCTATCATTAATAACACTGTTTACACAAAAGTTGATGGTGTTGATGTAGAATTGTTTGAAAATAAAACAACATTACCTG
TTAATGTAGCATTTGAGCTTTGGGCTAAGCGCAACATTAAACCAGTACCAGAGGTGAAAATACTCAATAATTTGGGTGTG
GACATTGCTGCTAATACTGTGATCTGGGACTACAAAAGAGATGCTCCAGCACATATATCTACTATTGGTGTTTGTTCTATG
ACTGACATAGCCAAGAAACCAACTGAAACGATTTGTGCACCACTCACTGTCTTTTTTGATGGTAGAGTTGATGGTCAAGTA
GACTTATTTAGAAATGCCCGTAATGGTGTTCTTATTACAGAAGGTAGTGTTAAAGGTTTACAACCATCTGTAGGTCCCAAA
CAAGCTAGTCTTAATGGAGTCACATTAATTGGAGAAGCCGTAAAAACACAGTTCAATTATTATAAGAAAGTTGATGGTGTT
GTCCAACAATTACCTGAAACTTACTTTACTCAGAGTAGAAATTTACAAGAATTTAAACCCAGGAGTCAAATGGAAATTGAT
TTCTTAGAATTAGCTATGGATGAATTCATTGAACGGTATAAATTAGAAGGCTATGCCTTCGAACATATCGTTTATGGAGAT
TTTAGTCATAGTCAGTTAGGTGGTTTACATCTACTGATTGGACTAGCTAAACGTTTTAAGGAATCACCTTTTGAATTAGAAG
ATTTTATTCCTATGGACAGTACAGTTAAAAACTATTTCATAACAGATGCGCAAACAGGTTCATCTAAGTGTGTGTGTTCTGT
TATTGATTTATTACTTGATGATTTTGTTGAAATAATAAAATCCCAAGATTTATCTGTAGTTTCTAAGGTTGTCAAAGTGACT
ATTGACTATACAGAAATTTCATTTATGCTTTGGTGTAAAGATGGCCATGTAGAAACATTTTACCCAAAATTACAATCTAGTC
AAGCGTGGCAACCGGGTGTTGCTATGCCTAATCTTTACAAAATGCAAAGAATGCTATTAGAAAAGTGTGACCTTCAAAATT
ATGGTGATAGTGCAACATTACCTAAAGGCATAATGATGAATGTCGCAAAATATACTCAACTGTGTCAATATTTAAACACAT
TAACATTAGCTGTACCCTATAATATGAGAGTTATACATTTTGGTGCTGGTTCTGATAAAGGAGTTGCACCAGGTACAGCTG
TTTTAAGACAGTGGTTGCCTACGGGTACGCTGCTTGTCGATTCAGATCTTAATGACTTTGTCTCTGATGCAGATTCAACTTT
GATTGGTGATTGTGCAACTGTACATACAGCTAATAAATGGGATCTCATTATTAGTGATATGTACGACCCTAAGACTAAAAA
TGTTACAAAAGAAAATGACTCTAAAGAGGGTTTTTTCACTTACATTTGTGGGTTTATACAACAAAAGCTAGCTCTTGGAGG
TTCCGTGGCTATAAAGATAACAGAACATTCTTGGAATGCTGATCTTTATAAGCTCATGGGACACTTCGCATGGTGGACAGC
CTTTGTTACTAATGTGAATGCGTCATCATCTGAAGCATTTTTAATTGGATGTAATTATCTTGGCAAACCACGCGAACAAATA
GATGGTTATGTCATGCATGCAAATTACATATTTTGGAGGAATACAAATCCAATTCAGTTGTCTTCCTATTCTTTATTTGACAT
GAGTAAATTTCCCCTTAAATTAAGGGGTACTGCTGTTATGTCTTTAAAAGAAGGTCAAATCAATGATATGATTTTATCTCTT
CTTAGTAAAGGTAGACTTATAATTAGAGAAAACAACAGAGTTGTTATTTCTAGTGATGTTCTTGTTAACAACTAAACGAAC
AATGTTTGTTTTTCTTGTTTTATTGCCACTAGTCTCTAGTCAGTGTGTTAATCTTACAACCAGAACTCAATTACCCCCTGCAT
ACACTAATTCTTTCACACGTGGTGTTTATTACCCTGACAAAGTTTTCAGATCCTCAGTTTTACATTCAACTCAGGACTTGTTC
TTACCTTTCTTTTCCAATGTTACTTGGTTCCATGCTATACATGTCTCTGGGACCAATGGTACTAAGAGGTTTGATAACCCTGT
CCTACCATTTAATGATGGTGTTTATTTTGCTTCCACTGAGAAGTCTAACATAATAAGAGGCTGGATTTTTGGTACTACTTTA
GATTCGAAGACCCAGTCCCTACTTATTGTTAATAACGCTACTAATGTTGTTATTAAAGTCTGTGAATTTCAATTTTGTAATG
ATCCATTTTTGGGTGTTTATTACCACAAAAACAACAAAAGTTGGATGGAAAGTGAGTTCAGAGTTTATTCTAGTGCGAATA
ATTGCACTTTTGAATATGTCTCTCAGCCTTTTCTTATGGACCTTGAAGGAAAACAGGGTAATTTCAAAAATCTTAGGGAATT
TGTGTTTAAGAATATTGATGGTTATTTTAAAATATATTCTAAGCACACGCCTATTAATTTAGTGCGTGATCTCCCTCAGGGT
TTTTCGGCTTTAGAACCATTGGTAGATTTGCCAATAGGTATTAACATCACTAGGTTTCAAACTTTACTTGCTTTACATAGAA
GTTATTTGACTCCTGGTGATTCTTCTTCAGGTTGGACAGCTGGTGCTGCAGCTTATTATGTGGGTTATCTTCAACCTAGGAC
TTTTCTATTAAAATATAATGAAAATGGAACCATTACAGATGCTGTAGACTGTGCACTTGACCCTCTCTCAGAAACAAAGTG
TACGTTGAAATCCTTCACTGTAGAAAAAGGAATCTATCAAACTTCTAACTTTAGAGTCCAACCAACAGAATCTATTGTTAGA
TTTCCTAATATTACAAACTTGTGCCCTTTTGGTGAAGTTTTTAACGCCACCAGATTTGCATCTGTTTATGCTTGGAACAGGA
AGAGAATCAGCAACTGTGTTGCTGATTATTCTTTCCTATATAATTCCGCATCATTTTCCACTTTTAAGTGTTATGGAGTGTCT
CCTACTAAATTAAATGATCTCTGCTTTACTAATGTCTATGCAGATTCATTTGTAATTAGAGGTGATGAAGTCAGACAAATCG
CTCCAGGGCAAACTGGAAAGATTGCTGATTATAATTATAAATTACCAGATGATTTTACAGGCTGCGTTATAGCTTGGAATT
CTAACAATCTTGATTCTAAGGTTGGTGGTAATTATAATTACCTGTATAGATTGTTTAGGAAGTCTAATCTCAAACCTTTTGA
GAGAGATATTTCAACTGAAATCTATCAGGCCGGTAGCACACCTTGTAATGGTGTTGAAGGTTTTAATTGTTACTTTCCTTTA
CAATCATATGGTTTCCAACCCACTAATGGTGTTGGTTACCAACCATACAGAGTAGTAGTACTTTCTTTTGAACTTCTACATG
CACCAGCAACTGTTTGTGGACCTAAAAAGTCTACTAATTTGGTTAAAAACAAATGTGTCAATTTCAACTTCAATGGTTTAAC
AGGCACAGGTGTTCTTACTGAGTCTAACAAAAAGTTTCTGCCTTTCCAACAATTTGGCAGAGACATTGCTGACACTACTGA
TGCTGTCCGTGATCCACAGACACTTGAGATTCTTGACATTACACCATGTTCTTTTGGTGGTGTCAGTGTTATAACACCAGGA
ACAAATACTTCTAACCAGGTTGCTGTTCTTTATCAGGATGTTAACTGCACAGAAGTCCCTGTTGCTATTCATGCAGATCAAC
TTACTCCTACTTGGCGTGTTTATTCTACAGGTTCTAATGTTTTTCAAACACGTGCAGGCTGTTTAATAGGGGCTGAACATGT
CAACAACTCATATGAGTGTGACATACCCATTGGTGCAGGTATATGCGCTAGTTATCAGACTCAGACTAATTCTCCTCGGCG
GGCACGTAGTGTAGCTAGTCAATCCATCATTGCCTACACTATGTCACTTGGTGCAGAAAATTCAGTTGCTTACTCTAATAAC
TCTATTGCCATACCCACAAATTTTACTATTAGTGTTACCACAGAAATTCTACCAGTGTCTATGACCAAGACATCAGTAGATT
GTACAATGTACATTTGTGGTGATTCAACTGAATGCAGCAATCTTTTGTTGCAATATGGCAGTTTTTGTACACAATTAAACCG
TGCTTTAACTGGAATAGCTGTTGAACAAGACAAAAACACCCAAGAAGTTTTTGCACAAGTCAAACAAATTTACAAAACACC
ACCAATTAAAGATTTTGGTGGTTTTAATTTTTCACAAATATTACCAGATCCATCAAAACCAAGCAAGAGGTCATTTATTGAA
GATCTACTTTTCAACAAAGTGACACTTGCAGATGCTGGCTTCATCAAACAATATGGTGATTGCCTTGGTGATATTGCTGCTA
GAGACCTCATTTGTGCACAAAAGTTTAACGGCCTTACTGTTTTGCCACCTTTGCTCACAGATGAAATGATTGCTCAATACAC
TTCTGCACTGTTAGCGGGTACAATCACTTCTGGTTGGACCTTTGGTGCAGGTGCTGCATTACAAATACCATTTGCTATGCA
AATGGCTTATAGGTTTAATGGTATTGGAGTTACACAGAATGTTCTCTATGAGAACCAAAAATTGATTGCCAACCAATTTAA
TAGTGCTATTGGCAAAATTCAAGACTCACTTTCTTCCACAGCAAGTGCACTTGGAAAACTTCAAGATGTGGTCAACCAAAA
TGCACAAGCTTTAAACACGCTTGTTAAACAACTTAGCTCCAATTTTGGTGCAATTTCAAGTGTTTTAAATGATATCCTTTCAC
GTCTTGACAAAGTTGAGGCTGAAGTGCAAATTGATAGGTTGATCACAGGCAGACTTCAAAGTTTGCAGACATATGTGACT
CAACAATTAATTAGAGCTGCAGAAATCAGAGCTTCTGCTAATCTTGCTGCTACTAAAATGTCAGAGTGTGTACTTGGACAA
TCAAAAAGAGTTGATTTTTGTGGAAAGGGCTATCATCTTATGTCCTTCCCTCAGTCAGCACCTCATGGTGTAGTCTTCTTGC
ATGTGACTTATGTCCCTGCACAAGAAAAGAACTTCACAACTGCTCCTGCCATTTGTCATGATGGAAAAGCACACTTTCCTC
GTGAAGGTGTCTTTGTTTCAAATGGCACACACTGGTTTGTAACACAAAGGAATTTTTATGAACCACAAATCATTACTACAG
ACAACACATTTGTGTCTGGTAACTGTGATGTTGTAATAGGAATTGTCAACAACACAGTTTATGATCCTTTGCAACCTGAATT
AGACTCATTCAAGGAGGAGTTAGATAAATATTTTAAGAATCATACATCACCAGATGTTGATTTAGGTGACATCTCTGGCAT
TAATGCTTCAGTTGTAAACATTCAAAAAGAAATTGACCGCCTCAATGAGGTTGCCAAGAATTTAAATGAATCTCTCATCGA
TCTCCAAGAACTTGGAAAGTATGAGCAGTATATAAAATGGCCATGGTACATTTGGCTAGGTTTTATAGCTGGCTTGATTGC
CATAGTAATGGTGACAATTATGCTTTGCTGTATGACCAGTTGCTGTAGTTGTCTCAAGGGCTGTTGTTCTTGTGGATCCTGC
TGCAAATTTGATGAAGACGACTCTGAGCCAGTGCTCAAAGGAGTCAAATTACATTACACATAAACGAACTTATGGATTTGT
TTATGAGAATCTTCACAATTGGAACTGTAACTTTGAAGCAAGGTGAAATCAAGGATGCTACTCCTTCAGATTTTGTTCGCG
CTACTGCAACGATACCGATACAAGCCTCACTCCCTTTCGGATGGCTTATTGTTGGCGTTGCACTTCTTGCTGTTTTTCAGAG
CGCTTCCAAAATCATAACCCTCAAAAAGAGATGGCAACTAGCACTCTCCAAGGGTGTTCACTTTGTTTGCAACTTGCTGTT
GTTGTTTGTAACAGTTTACTCACACCTTTTGCTCGTTGCTGCTGGCCTTGAAGCCCCTTTTCTCTATCTTTATGCTTTAGTCTA
CTTCTTGCAGAGTATAAACTTTGTAAGAATAATAATGAGGCTTTGGCTTTGCTGGAAATGCCGTTCCAAAAACCCATTACTT
TATGATGCCAACTATTTTCTTTGCTGGCATACTAATTGTTACGACTATTGTATACCTTACAATAGTGTAACTTCTTCAATTGT
CATTACTTCAGGTGATGGCACAACAAGTCCTATTTCTGAACATGACTACCAGATTGGTGGTTATACTGAAAAATGGGAATC
TGGAGTAAAAGACTGTGTTGTATTACACAGTTACTTCACTTCAGACTATTACCAGCTGTACTCAACTCAATTGAGTACAGAC
ACTGGTGTTGAACATGTTACCTTCTTCATCTACAATAAAATTGTTGATGAGCCTGAAGAACATGTCCAAATTCACACAATCG
ACGTTTCATCCGGAGTTGTTAATCCAGTAATGGAACCAATTTATGATGAACCGACGACGACTACTAGCGTGCCTTTGTAAG
CACAAGCTGATGAGTACGAACTTATGTACTCATTCGTTTCGGAAGAGACAGGTACGTTAATAGTTAATAGCGTACTTCTTT
TTCTTGCTTTCGTGGTATTCTTGCTAGTTACACTAGCCATCCTTACTGCGCTTCGATTGTGTGCGTACTGCTGCAATATTGTT
AACGTGAGTCTTGTAAAACCTTCTTTTTACGTTTACTCTCGTGTTAAAAATCTGAATTCTTCTAGAGTTCCTGATCTTCTGGT
CTAAACGAACTAAATATTATATTAGTTTTTCTGTTTGGAACTTTAATTTTAGCCATGGCAGATTCCAACGGTACTATTACCGT
TGAAGAGCTTAAAAAGCTCCTTGAACAATGGAACCTAGTAATAGGTTTCCTATTCCTTACATGGATTTGTCTTCTACAATTT
GCCTATGCCAACAGGAATAGGTTTTTGTATATAATTAAGTTAATTTTCCTCTGGCTGTTATGGCCAGTAACTTTAGCTTGTT
TTGTGCTTGCTGCTGTTTACAGAATAAATTGGATCACCGGTGGAATTGCTATCGCAATGGCTTGTCTTGTAGGCTTGATGT
GGCTCAGCTACTTCATTGCTTCTTTCAGACTGTTTGCGCGTACGCGTTCCATGTGGTCATTCAATCCAGAAACTAACATTCT
TCTCAACGTGCCACTCCATGGCACTATTCTGACCAGACCGCTTCTAGAAAGTGAACTCGTAATCGGAGCTGTGATCCTTCG
TGGACATCTTCGTATTGCTGGACACCATCTAGGACGCTGTGACATCAAGGACCTGCCTAAAGAAATCACTGTTGCTACATC
ACGAACGCTTTCTTATTACAAATTGGGAGCTTCGCAGCGTGTAGCAGGTGACTCAGGTTTTGCTGCATACAGTCGCTACAG
GATTGGCAACTATAAATTAAACACAGACCATTCCAGTAGCAGTGACAATATTGCTTTGCTTGTACAGTAAGTGACAACAGA
TGTTTCATCTCGTTGACTTTCAGGTTACTATAGCAGAGATATTACTAATTATTATGAGGACTTTTAAAGTTTCCATTTGGAAT
CTTGATTACATCATAAACCTCATAATTAAAAATTTATCTAAGTCACTAACTGAGAATAAATATTCTCAATTAGATGAAGAGC
AACCAATGGAGATTGATTAAACGAACATGAAAATTATTCTTTTCTTGGCACTGATAACACTCGCTACTTGTGAGCTTTATCA
CTACCAAGAGTGTGTTAGAGGTACAACAGTACTTTTAAAAGAACCTTGCTCTTCTGGAACATACGAGGGCAATTCACCATT
TCATCCTCTAGCTGATAACAAATTTGCACTGACTTGCTTTAGCACTCAATTTGCTTTTGCTTGTCCTGACGGCGTAAAACAC
GTCTATCAGTTACGTGCCAGATCAGTTTCACCTAAACTGTTCATCAGACAAGAGGAAGTTCAAGAACTTTACTCTCCAATTT
TTCTTATTGTTGCGGCAATAGTGTTTATAACACTTTGCTTCACACTCAAAAGAAAGACAGAATGATTGAACTTTCATTAATT
GACTTCTATTTGTGCTTTTTAGCCTTTCTGCTATTCCTTGTTTTAATTATGCTTATTATCTTTTGGTTCTCACTTGAACTGCAA
GATCATAATGAAACTTGTCACGCCTAAACGAACATGAAATTTCTTGTTTTCTTAGGAATCATCACAACTGTAGCTGCATTTC
ACCAAGAATGTAGTTTACAGTCATGTACTCAACATCAACCATATGTAGTTGATGACCCGTGTCCTATTCACTTCTATTCTAA
ATGGTATATTAGAGTAGGAGCTAGAAAATCAGCACCTTTAATTGAATTGTGCGTGGATGAGGCTGGTTCTAAATCACCCA
TTCAGTACATCGATATCGGTAATTATACAGTTTCCTGTTTACCTTTTACAATTAATTGCCAGGAACCTAAATTGGGTAGTCTT
GTAGTGCGTTGTTCGTTCTATGAAGACTTTTTAGAGTATCATGACGTTCGTGTTGTTTTAGATTTCATCTAAACGAACAAAC
TAAAATGTCTGATAATGGACCCCAAAATCAGCGAAATGCACCCCGCATTACGTTTGGTGGACCCTCAGATTCAACTGGCA
GTAACCAGAATGGAGAACGCAGTGGGGCGCGATCAAAACAACGTCGGCCCCAAGGTTTACCCAATAATACTGCGTCTTG
GTTCACCGCTCTCACTCAACATGGCAAGGAAGACCTTAAATTCCCTCGAGGACAAGGCGTTCCAATTAACACCAATAGCAG
TCCAGATGACCAAATTGGCTACTACCGAAGAGCTACCAGACGAATTCGTGGTGGTGACGGTAAAATGAAAGATCTCAGTC
CAAGATGGTATTTCTACTACCTAGGAACTGGGCCAGAAGCTGGACTTCCCTATGGTGCTAACAAAGACGGCATCATATGG
GTTGCAACTGAGGGAGCCTTGAATACACCAAAAGATCACATTGGCACCCGCAATCCTGCTAACAATGCTGCAATCGTGCT
ACAACTTCCTCAAGGAACAACATTGCCAAAAGGCTTCTACGCAGAAGGGAGCAGAGGCGGCAGTCAAGCCTCTTCTCGTT
CCTCATCACGTAGTCGCAACAGTTCAAGAAATTCAACTCCAGGCAGCAGTAGGGGAACTTCTCCTGCTAGAATGGCTGGC
AATGGCGGTGATGCTGCTCTTGCTTTGCTGCTGCTTGACAGATTGAACCAGCTTGAGAGCAAAATGTCTGGTAAAGGCCA
ACAACAACAAGGCCAAACTGTCACTAAGAAATCTGCTGCTGAGGCTTCTAAGAAGCCTCGGCAAAAACGTACTGCCACTA
AAGCATACAATGTAACACAAGCTTTCGGCAGACGTGGTCCAGAACAAACCCAAGGAAATTTTGGGGACCAGGAACTAATC
AGACAAGGAACTGATTACAAACATTGGCCGCAAATTGCACAATTTGCCCCCAGCGCTTCAGCGTTCTTCGGAATGTCGCGC
ATTGGCATGGAAGTCACACCTTCGGGAACGTGGTTGACCTACACAGGTGCCATCAAATTGGATGACAAAGATCCAAATTT
CAAAGATCAAGTCATTTTGCTGAATAAGCATATTGACGCATACAAAACATTCCCACCAACAGAGCCTAAAAAGGACAAAA
AGAAGAAGGCTGATGAAACTCAAGCCTTACCGCAGAGACAGAAGAAACAGCAAACTGTGACTCTTCTTCCTGCTGCAGAT
TTGGATGATTTCTCCAAACAATTGCAACAATCCATGAGCAGTGCTGACTCAACTCAGGCCTAAACTCATGCAGACCACACA
AGGCAGATGGGCTATATAAACGTTTTCGCTTTTCCGTTTACGATATATAGTCTACTCTTGTGCAGAATGAATTCTCGTAACT
ACATAGCACAAGTAGATGTAGTTAACTTTAATCTCACATAGCAATCTTTAATCAGTGTGTAACATTAGGGAGGACTTGAAA
GAGCCACCACATTTTCACCGAGGCCACGCGGAGTACGATCGAGTGTACAGTGAACAATGCTAGGGAGAGCTGCCTATAT
GGAAGAGCCCTAATGTGTAAAATTAATTTTAGTAGTGCTATCCCCATGTGATTTTAATAGCTTCTTAGGAGAATGACAAAA
SEQ ID NO: 13
>Severe acute respiratory syndrome coronavirus 2 orfab polyprotein of isolate hCoV-19/France/IDF0372-
isl/2020
MESLVPGFNEKTHVQLSLPVLQVRDVLVRGFGDSVEEVLSEARQHLKDGTCGLVEVEKGVLPQLEQPYVFIKRSDARTAPHGH
VMVELVAELEGIQYGRSGETLGVLVPHVGEIPVAYRKVLLRKNGNKGAGGHSYGADLKSFDLGDELGTDPYEDFQENWNTKH
SSGVTRELMRELNGGAYTRYVDNNFCGPDGYPLECIKDLLARAGKASCTLSEQLDFIDTKRGVYCCREHEHEIAWYTERSEKSYE
LQTPFEIKLAKKFDTFNGECPNFVFPLNSIIKTIQPRVEKKKLDGFMGRIRSVYPVASPNECNQMCLSTLMKCDHCGETSWQTG
DFVKATCEFCGTENLTKEGATTCGYLPQNAVVKIYCPACHNSEVGPEHSLAEYHNESGLKTILRKGGRTIAFGGCVFSYVGCHNK
CAYWVPRASANIGCNHTGVVGEGSEGLNDNLLEILQKEKVNINIVGDFKLNEEIAIILASFSASTSAFVETVKGLDYKAFKQIVESC
GNFKVTKGKAKKGAWNIGEQKSILSPLYAFASEAARVVRSIFSRTLETAQNSVRVLQKAAITILDGISQYSLRLIDAMMFTSDLAT
NNLVVMAYITGGVVQLTSQWLTNIFGTVYEKLKPVLDWLEEKFKEGVEFLRDGWEIVKFISTCACEIVGGQIVTCAKEIKESVQT
FFKLVNKFLALCADSIIIGGAKLKALNLGETFVTHSKGLYRKCVKSREETGLLMPLKAPKEIIFLEGETLPTEVLTEEVVLKTGDLQPL
EQPTSEAVEAPLVGTPVCINGLMLLEIKDTEKYCALAPNMMVTNNTFTLKGGAPTKVTFGDDTVIEVQGYKSVNITFELDERIDK
VLNEKCSAYTVELGTEVNEFACVVADAVIKTLQPVSELLTPLGIDLDEWSMATYYLFDESGEFKLASHMYCSFYPPDEDEEEGDC
EEEEFEPSTQYEYGTEDDYQGKPLEFGATSAALQPEEEQEEDWLDDDSQQTVGQQDGSEDNQTTTIQTIVEVQPQLEMELTP
VVQTIEVNSFSGYLKLTDNVYIKNADIVEEAKKVKPTVVVNAANVYLKHGGGVAGALNKATNNAMQVESDDYIATNGPLKVG
GSCVLSGHNLAKHCLHVVGPNVNKGEDIQLLKSAYENFNQHEVLLAPLLSAGIFGADPIHSLRVCVDTVRTNVYLAVFDKNLYD
KLVSSFLEMKSEKQVEQKIAEIPKEEVKPFITESKPSVEQRKQDDKKIKACVEEVTTTLEETKFLTENLLLYIDINGNLHPDSATLVSD
IDITFLKKDAPYIVGDVVQEGVLTAVVIPTKKAGGTTEMLAKALRKVPTDNYITTYPGQGLNGYTVEEAKTVLKKCKSAFYILPSIIS
NEKQEILGTVSWNLREMLAHAEETRKLMPVCVETKAIVSTIQRKYKGIKIQEGVVDYGARFYFYTSKTTVASLINTLNDLNETLVT
MPLGYVTHGLNLEEAARYMRSLKVPATVSVSSPDAVTAYNGYLTSSSKTPEEHFIETISLAGSYKDWSYSGQSTQLGIEFLKRGD
KSVYYTSNPTTFHLDGEVITFDNLKTLLSLREVRTIKVFTTVDNINLHTQVVDMSMTYGQQFGPTYLDGADVTKIKPHNSHEGKT
FYVLPNDDTLRVEAFEYYHTTDPSFLGRYMSALNHTKKWKYPQVNGLTSIKWADNNCYLATALLTLQQIELKFNPPALQDAYYR
ARAGEAANFCALILAYCNKTVGELGDVRETMSYLFQHANLDSCKRVLNVVCKTCGQQQTTLKGVEAVMYMGTLSYEQFKKGV
QIPCTCGKQATKYLVQQESPFVMMSAPPAQYELKHGTFTCASEYTGNYQCGHYKHITSKETLYCIDGALLTKSSEYKGPITDVFY
KENSYTTTIKPVTYKLQGVVCTEIDPKLDNYYKKDNSYFTEQPIDLVPNQPYPNASFDNFKFVCDNIKFADDLNQLTGYKKPASRE
LKVTFFPDLNGDVVAIDYKHYTPSFKKGAKLLHKPIVWHVNNATNKATYKPNTWCIRCLWSTKPVETSNSFDVLKSEDAQGMD
NLACEDLKPVSEEVVENPTIQKDVLECNVKTTEVVGDIILKPANNSLKITEEVGHTDLMAAYVDNSSLTIKKPNELSRVLGLKTLAT
HGLAAVNSVPWDTIANYAKPFLNKVVSTTTNIVTRCLNRVCTNYMPYFFTLLLQLCTFTRSTNSRIKASMPTTIAKNTVKSVGKF
CLEASFNYLKSPNFSKLINIIIWFLLLSVCLGSLIYSTAALGVLMSNLGMPSYCTGYREGYLNSTNVTIATYCTGSIPCSVCLSGLDSL
DTYPSLETIQITISSFKWDLTAFGLVAEWFLAYILFTRFFYVLGLAAIMQLFFSYFAVHFISNSWLMWLIINLVQMAPISAMVRMY
IFFASFYYVWKSYVHVVDGCNSSTCMMCYKRNRATRVECTTIVNGVRRSFYVYANGGKGFCKLHNWNCVNCDTFCAGSTFIS
DEVARDLSLQFKRPINPTDQSSYIVDSVTVKNGSIHLYFDKAGQKTYERHSLSHFVNLDNLRANNTKGSLPINVIVFDGKSKCEES
SAKSASVYYSQLMCQPILLLDQALVSDVGDSAEVAVKMFDAYVNTFSSTFNVPMEKLKTLVATAEAELAKNVSLDNVLSTFISAA
RQGFVDSDVETKDVVECLKLSHQSDIEVTGDSCNNYMLTYNKVENMTPRDLGACIDCSARHINAQVAKSHNIALIWNVKDFM
SLSEQLRKQIRSAAKKNNLPFKLTCATTRQVVNVVTTKIALKGGKIVNNWLKQLIKVTLVFLFVAAIFYLITPVHVMSKHTDFSSEII
GYKAIDGGVTRDIASTDTCFANKHADFDTWFSQRGGSYTNDKACPLIAAVITREVGFVVPGLPGTILRTTNGDFLHFLPRVFSAV
GNICYTPSKLIEYTDFATSACVLAAECTIFKDASGKPVPYCYDTNVLEGSVAYESLRPDTRYVLMDGSIIQFPNTYLEGSVRVVTTF
DSEYCRHGTCERSEAGVCVSTSGRWVLNNDYYRSLPGVFCGVDAVNLLTNMFTPLIQPIGALDISASIVAGGIVAIVVTCLAYYF
MRFRRAFGEYSHVVAFNTLLFLMSFTVLCLTPVYSFLPGVYSVIYLYLTFYLTNDVSFLAHIQWMVMFTPLVPFWITIAYIICISTK
HFYWFFSNYLKRRVVFNGVSFSTFEEAALCTFLLNKEMYLKLRSDVLLPLTQYNRYLALYNKYKYFSGAMDTTSYREAACCHLAK
ALNDFSNSGSDVLYQPPQTSITSAVLQSGFRKMAFPSGKVEGCMVQVTCGTTTLNGLWLDDVVYCPRHVICTSEDMLNPNYE
DLLIRKSNHNFLVQAGNVQLRVIGHSMQNCVLKLKVDTANPKTPKYKFVRIQPGQTFSVLACYNGSPSGVYQCAMRPNFTIKG
SFLNGSCGSVGFNIDYDCVSFCYMHHMELPTGVHAGTDLEGNFYGPFVDRQTAQAAGTDTTITVNVLAWLYAAVINGDRWF
LNRFTTTLNDFNLVAMKYNYEPLTQDHVDILGPLSAQTGIAVLDMCASLKELLQNGMNGRTILGSALLEDEFTPFDVVRQCSGV
TFQSAVKRTIKGTHHWLLLTILTSLLVLVQSTQWSLFFFLYENAFLPFAMGIIAMSAFAMMFVKHKHAFLCLFLLPSLATVAYFN
MVYMPASWVMRIMTWLDMVDTSLSGFKLKDCVMYASAVVLLILMTARTVYDDGARRVWTLMNVLTLVYKVYYGNALDQA
ISMWALIISVTSNYSGVVTTVMFLARGIVFMCVEYCPIFFITGNTLQCIMLVYCFLGYFCTCYFGLFCLLNRYFRLTLGVYDYLVST
QEFRYMNSQGLLPPKNSIDAFKLNIKLLGVGGKPCIKVATVQSKMSDVKCTSVVLLSVLQQLRVESSSKLWAQCVQLHNDILLA
KDTTEAFEKMVSLLSVLLSMQGAVDINKLCEEMLDNRATLQAIASEFSSLPSYAAFATAQEAYEQAVANGDSEVVLKKLKKSLN
VAKSEFDRDAAMQRKLEKMADQAMTQMYKQARSEDKRAKVTSAMQTMLFTMLRKLQNDALNNIINNARDGCVPLNIIPLT
TAAKLMVVIPDYNTYKNTCDGTTFTYASALWEIQQVVDADSKIVQLSEISMDNSPNLAWPLIVTALRANSAVKLQNNELSPVAL
RQMSCAAGTTQTACTDDNALAYYNTTKGGRFVLALLSDLQDLKWARFPKSDGTGTIYTELEPPCRFVTDTPKGPKVKYLYFIKG
LNNLNRGMVLGSLAATVRLQAGNATEVPANSTVLSFCAFAVDAAKAYKDYLASGGQPITNCVKMLCTHTGTGQAITVTPEAN
MDQESFGGASCCLYCRCHIDHPNPKGFCDLKGKYVQIPTTCANDPVGFTLKNTVCTVCGMWKGYGCSCDQLREPMLQSADA
QSFLNGFAV
SEQ ID NO: 14
>Protein\S_Human\2019-nCoV(Sprotein_hCoV19France|DF0372isl2020)
MFVFLVLLPLVSSQCVNLTTRTQLPPAYTNSFTRGVYYPDKVFRSSVLHSTQDLFLPFFSNVTWFHAIHVSGTNGTKRFDNPVLP
FNDGVYFASTEKSNIIRGWIFGTTLDSKTQSLLIVNNATNVVIKVCEFQFCNDPFLGVYYHKNNKSWMESEFRVYSSANNCTFEY
VSQPFLMDLEGKQGNFKNLREFVFKNIDGYFKIYSKHTPINLVRDLPQGFSALEPLVDLPIGINITRFQTLLALHRSYLTPGDSSSG
WTAGAAAYYVGYLQPRTFLLKYNENGTITDAVDCALDPLSETKCTLKSFTVEKGIYQTSNFRVQPTESIVRFPNITNLCPFGEVFN
ATRFASVYAWNRKRISNCVADYSFLYNSASFSTFKCYGVSPTKLNDLCFTNVYADSFVIRGDEVRQIAPGQTGKIADYNYKLPDD
FTGCVIAWNSNNLDSKVGGNYNYLYRLFRKSNLKPFERDISTEIYQAGSTPCNGVEGFNCYFPLQSYGFQPTNGVGYQPYRVVV
LSFELLHAPATVCGPKKSTNLVKNKCVNFNFNGLTGTGVLTESNKKFLPFQQFGRDIADTTDAVRDPQTLEILDITPCSFGGVSVI
TPGTNTSNQVAVLYQDVNCTEVPVAIHADQLTPTWRVYSTGSNVFQTRAGCLIGAEHVNNSYECDIPIGAGICASYQTQTNSP
RRARSVASQSIIAYTMSLGAENSVAYSNNSIAIPTNFTISVTTEILPVSMTKTSVDCTMYICGDSTECSNLLLQYGSFCTQLNRALT
GIAVEQDKNTQEVFAQVKQIYKTPPIKDFGGFNFSQILPDPSKPSKRSFIEDLLFNKVTLADAGFIKQYGDCLGDIAARDLICAQKF
NGLTVLPPLLTDEMIAQYTSALLAGTITSGWTFGAGAALQIPFAMQMAYRFNGIGVTQNVLYENQKLIANQFNSAIGKIQDSLS
STASALGKLQDVVNQNAQALNTLVKQLSSNFGAISSVLNDILSRLDKVEAEVQIDRLITGRLQSLQTYVTQQLIRAAEIRASANLA
ATKMSECVLGQSKRVDFCGKGYHLMSFPQSAPHGVVFLHVTYVPAQEKNFTTAPAICHDGKAHFPREGVFVSNGTHWFVTQ
RNFYEPQUITTDNTFVSGNCDVVIGIVNNTVYDPLQPELDSFKEELDKYFKNHTSPDVDLGDISGINASVVNIQKEIDRLNEVAKN
LNESLIDLQELGKYEQYIKWPWYIWLGFIAGLIAIVMVTIMLCCMTSCCSCLKGCCSCGSCCKFDEDDSEPVLKGVKLHYT
SEQ ID NO: 15
>hCoV-19/Austria/CeMM0360/2020|EPL_ISL_438123|2020-Apr.-05
NNNNNNNNNNNNNNNNNNNNNNNNNNNNNNACCAACCAACTTTCGATCTCTTGTAGATCTGTTCTCTAAACGAACTT
TAAAATCTGTGTGGCTGTCACTCGGCTGCATGCTTAGTGCACTCACGCAGTATAATTAATAACTAATTACTGTCGTTGACA
GGACACGAGTAACTCGTCTATCTTCTGCAGGCTGCTTACGGTTTCGTCCGTGTTGCAGCCGATCATCAGCACATCTAGGTT
TTGTCCGGGTGTGACCGAAAGGTAAGATGGAGAGCCTTGTCCCTGGTTTCAACGAGAAAACACACGTCCAACTCAGTTTG
CCTGTTTTACAGGTTCGCGACGTGCTCGTACGTGGCTTTGGAGACTCCGTGGAGGAGGTCTTATCAGAGGCACGTCAACA
TCTTAAAGATGGCACTTGTGGCTTAGTAGAAGTTGAAAAAGGCGTTTTGCCTCAACTTGAACAGCCCTATGTGTTCATCAA
ACGTTCGGATGCTCGAACTGCACCTCATGGTCATGTTATGGTTGAGCTGGTAGCAGAACTCGAAGGCATTCAGTACGGTC
GTAGTGGTGAGACACTTGGTGTCCTTGTCCCTCATGTGGGCGAAATACCAGTGGCTTACCGCAAGGTTCTTCTTCGTAAGA
ACGGTAATAAAGGAGCTGGTGGCCATAGTTACGGCGCCGATCTAAAGTCATTTGACTTAGGCGACGAGCTTGGCACTGAT
CCTTATGAAGATTTTCAAGAAAACTGGAACACTAAACATAGCAGTGGTGTTACCCGTGAACTCATGCGTGAGCTTAACGG
AGGGGCATACACTCGCTATGTCGATAACAACTTCTGTGGCCCTGATGGCTACCCTCTTGAGTGCATTAAAGACCTTCTAGC
ACGTGCTGGTAAAGCTTCATGCACTTTGTCCGAACAACTGGACTTTATTGACACTAAGAGGGGTGTATACTGCTGCCGTGA
ACATGAGCATGAAATTGCTTGGTACACGGAACGTTCTGAAAAGAGCTATGAATTGCAGACACCTTTTGAAATTAAATTGG
CAAAGAAATTTGACACCTTCAATGGGGAATGTCCAAATTTTGTATTTCCCTTAAATTCCATAATCAAGACTATTCAACCAAG
GGTTGAAAAGAAAAAGCTTGATGGCTTTATGGGTAGAATTCGATCTGTCTATCCAGTTGCGTCACCAAATGAATGCAACC
AAATGTGCCTTTCAACTCTCATGAAGTGTGATCATTGTGGTGAAACTTCATGGCAGACGGGCGATTTTGTTAAAGCCACTT
GCGAATTTTGTGGCACTGAGAATTTGACTAAAGAAGGTGCCACTACTTGTGGTTACTTACCCCAAAATGCTGTTGTTAAAA
TTTATTGTCCAGCATGTCACAATTCAGAAGTAGGACCTGAGCATAGTCTTGCCGAATACCATAATGAATCTGGCTTGAAAA
CCATTCTTCGTAAGGGTGGTCGCACTATTGCCTTTGGAGGCTGTGTGTTCTCTTATGTTGGTTGCCATAACAAGTGTGCCTA
TTGGGTTCCACGTGCTAGCGCTAACATAGGTTGTAACCATACAGGTGTTGTTGGAGAAGGTTCCGAAGGTCTTAATGACA
ACCTTCTTGAAATACTCCAAAAAGAGAAAGTCAACATCAATATTGTTGGTGACTTTAAACTTAATGAAGAGATCGCCATTA
TTTTGGCATCTTTTTCTGCTTCCACAAGTGCTTTTGTGGAAACTGTGAAAGGTTTGGATTATAAAGCATTCAAACAAATTGT
TGAATCCTGTGGTAATTTTAAAGTTACAAAAGGAAAAGCTAAAAAAGGTGCCTGGAATATTGGTGAACAGAAATCAATAC
TGAGTCCTCTTTATGCATTTGCATCAGAGGCTGCTCGTGTTGTACGATCAATTTTCTCCCGCACTCTTGAAACTGCTCAAAA
TTCTGTGCGTGTTTTACAGAAGGCCGCTATAACAATACTAGATGGAATTTCACAGTATTCACTGAGACTCATTGATGCTAT
GATGTTCACATCTGATTTGGCTACTAACAATCTAGTTGTAATGGCCTACATTACAGGTGGTGTTGTTCAGTTGACTTCGCAG
TGGCTAACTAACATCTTTGGCACTGTTTATGAAAAACTCAAACCCGTCCTTGATTGGCTTGAAGAGAAGTTTAAGGAAGGT
GTAGAGTTTCTTAGAGACGGTTGGGAAATTGTTAAATTTATCTCAACCTGTGCTTGTGAAATTGTCGGTGGACAAATTGTC
ACCTGTGCAAAGGAAATTAAGGAGAGTGTTCAGACATTCTTTAAGCTTGTAAATAAATTTTTGGCTTTGTGTGCTGACTCT
ATCATTATTGGTGGAGCTAAACTTAAAGCCTTGAATTTAGGTGAAACATTTGTCACGCACTCAAAGGGATTGTACAGAAA
GTGTGTTAAATCCAGAGAAGAAACTGGCCTACTCATGCCTCTAAAAGCCCCAAAAGAAATTATCTTCTTAGAGGGAGAAA
CACTTCCCACAGAAGTGTTAACAGAGGAAGTTGTCTTGAAAACTGGTGATTTACAACCATTAGAACAACCTACTAGTGAA
GCTGTTGAAGCTCCATTGGTTGGTACACCAGTTTGTATTAACGGGCTTATGTTGCTCGAAATCAAAGACACAGAAAAGTAC
TGTGCCCTTGCACCTAATATGATGGTAACAAACAATACCTTCACACTCAAAGGCGGTGCACCAACAAAGGTTACTTTTGGT
GATGACACTGTGATAGAAGTGCAAGGTTACAAGAGTGTGAATATCACTTTTGAACTTGATGAAAGGATTGATAAAGTACT
TAATGAGAAGTGCTCTGCCTATACAGTTGAACTCGGTACAGAAGTAAATGAGTTCGCCTGTGTTGTGGCAGATGCTGTCA
TAAAAACTTTGCAACCAGTATCTGAATTACTTACACCACTGGGCATTGATTTAGATGAGTGGAGTATGGCTACATACTACT
TATTTGATGAGTCTGGTGAGTTTAAATTGGCTTCACATATGTATTGTTCTTTTTACCCTCCAGATGAGGATGAAGAAGAAG
GTGATTGTGAAGAAGAAGAGTTTGAGCCATCAACTCAATATGAGTATGGTACTGAAGATGATTACCAAGGTAAACCTTTG
GAATTTGGTGCCACTTCTGCTGCTCTTCAACCTGAAGAAGAGCAAGAAGAAGATTGGTTAGATGATGATAGTCAACAAAC
TGTTGGTCAACAAGACGGCAGTGAGGACAATCAGACAACTACTATTCAAACAATTGTTGAGGTTCAACCTCAATTAGAGA
TGGAACTTACACCAGTTGTTCAGACTATTGAAGTGAATAGTTTTAGTGGTTATTTAAAACTTACTGACAATGTATACATTAA
AAATGCAGACATTGTGGAAGAAGCTAAAAAGGTAAAACCAACAGTGGTTGTTAATGCAGCCAATGTTTACCTTAAACATG
GAGGAGGTGTTGCAGGAGCCTTAAATAAGGCTACTAACAATGCCATGCAAGTTGAATCTGATGATTACATAGCTACTAAT
GGACCACTTAAAGTGGGTGGTAGTTGTGTTTTAAGCGGACACAATCTTGCTAAACACTGTCTTCATGTTGTCGGCCCAAAT
GTTAACAAAGGTGAAGACATTCAACTTCTTAAGAGTGCTTATGAAAATTTTAATCAGCACGAAGTTCTACTTGCACCATTAT
TATCAGCTGGTATTTTTGGTGCTGACCCTATACATTCTTTAAGAGTTTGTGTAGATACTGTTCGCACAAATGTCTACTTAGC
TGTCTTTGATAAAAATCTCTATGACAAACTTGTTTCAAGCTTTTTGGAAATGAAGAGTGAAAAGCAAGTTGAACAAAAGAT
CGCTGAGATTCCTAAAGAGGAAGTTAAGCCATTTATAACTGAAAGTAAACCTTCAGTTGAACAGAGAAAACAAGATGATA
AGAAAATCAAAGCTTGTGTTGAAGAAGTTACAACAACTCTGGAAGAAACTAAGTTCCTCACAGAAAACTTGTTACTTTATA
TTGACATTAATGGCAATCTTCATCCAGATTCTGCCACTCTTGTTAGTGACATTGACATCACTTTCTTAAAGAAAGATGCTCC
ATATATAGTGGGTGATGTTGTTCAAGAGGGTGTTTTAACTGCTGTGGTTATACCTACTAAAAAGGCTGGTGGCACTACTG
AAATGCTAGCGAAAGCTTTGAGAAAAGTGCCAACAGACAATTATATAACCACTTACCCGGGTCAGGGTTTAAATGGTTAC
ACTGTAGAGGAGGCAAAGACAGTGCTTAAAAAGTGTAAAAGTGCCTTTTACATTCTACCATCTATTATCTCTAATGAGAAG
CAAGAAATTCTTGGAACTGTTTCTTGGAATTTGCGAGAAATGCTTGCACATGCAGAAGAAACACGCAAATTAATGCCTGTC
TGTGTGGAAACTAAAGCCATAGTTTCAACTATACAGCGTAAATATAAGGGTATTAAAATACAAGAGGGTGTGGTTGATTA
TGGTGCTAGATTTTACTTTTACACCAGTAAAACAACTGTAGCGTCACTTATCAACACACTTAACGATCTAAATGAAACTCTT
GTTACAATGCCACTTGGCTATGTAACACATGGCTTAAATTTGGAAGAAGCTGCTCGGTATATGAGATCTCTCAAAGTGCCA
GCTACAGTTTCTGTTTCTTCACCTGATGCTGTTACAGCGTATAATGGTTATCTTACTTCTTCTTCTAAAACACCTGAAGAACA
TTTTATTGAAACCATCTCACTTGCTGGTTCCTATAAAGATTGGTCCTATTCTGGACAATCTACACAACTAGGTATAGAATTTC
TTAAGAGAGGTGATAAAAGTGTATATTACACTAGTAATCCTACCACATTCCACCTAGATGGTGAAGTTATCACCTTTGACA
ATCTTAAGACACTTCTTTCTTTGAGAGAAGTGAGGACTATTAAGGTGTTTACAACAGTAGACAACATTAACCTCCACACGC
AAGTTGTGGACATGTCAATGACATATGGACAACAGTTTGGTCCAACTTATTTGGATGGAGCTGATGTTACTAAAATAAAAC
CTCATAATTCACATGAAGGTAAAACATTTTATGTTTTACCTAATGATGACACTCTACGTGTTGAGGCTTTTGAGTACTACCA
CACAACTGATCCTAGTTTTCTGGGTAGGTACATGTCAGCATTAAATCACACTAAAAAGTGGAAATACCCACAAGTTAATGG
TTTAACTTCTATTAAATGGGCAGATAACAACTGTTATCTTGCCACTGCATTGTTAACACTCCAACAAATAGAGTTGAAGTTT
AATCCACCTGCTCTACAAGATGCTTATTACAGAGCAAGGGCTGGTGAAGCTGCTAACTTTTGTGCACTTATCTTAGCCTACT
GTAATAAGACAGTAGGTGAGTTAGGTGATGTTAGAGAAACAATGAGTTACTTGTTTCAACATGCCAATTTAGATTCTTGCA
AAAGAGTCTTGAACGTGGTGTGTAAAACTTGTGGACAACAGCAGACAACCCTTAAGGGTGTAGAAGCTGTTATGTACATG
GGCACACTTTCTTATGAACAATTTAAGAAAGGTGTTCAGATACCTTGTACGTGTGGTAAACAAGCTACAAAATATCTAGTA
CAACAGGAGTCACCTTTTGTTATGATGTCAGCACCACCTGCTCAGTATGAACTTAAGCATGGTACATTTACTTGTGCTAGTG
AGTACACTGGTAATTACCAGTGTGGTCACTATAAACATATAACTTCTAAAGAAACTTTGTATTGCATAGACGGTGCTTTACT
TACAAAGTCCTCAGAATACAAAGGTCCTATTACGGATGTTTTCTACAAAGAAAACAGTTACACAACAACCATAAAACCAGT
TACTTATAAATTGGATGGTGTTGTTTGTACAGAAATTGACCCTAAGTTGGACAATTATTATAAGAAAGACAATTCTTATTTC
ACAGAGCAACCAATTGATCTTGTACCAAACCAACCATATCCAAACGCAAGCTTCGATAATTTTAAGTTTGTATGTGATAAT
ATCAAATTTGCTGATGATTTAAACCAGTTAACTGGTTATAAGAAACCTGCTTCAAGAGAGCTTAAAGTTACATTTTTCCCTG
ACTTAAATGGTGATGTGGTGGCTATTGATTATAAACACTACACACCCTCTTTTAAGAAAGGAGCTAAATTGTTACATAAAC
CTATTGTTTGGCATGTTAACAATGCAACTAATAAAGCCACGTATAAACCAAATACCTGGTGTATACGTTGTCTTTGGAGCA
CAAAACCAGTTGAAACATCAAATTCGTTTGATGTACTGAAGTCAGAGGACGCGCAGGGAATGGATAATCTTGCCTGCGAA
GATCTAAAACCAGTCTCTGAAGAAGTAGTGGAAAATCCTACCATACAGAAAGACGTTCTTGAGTGTAATGTGAAAACTAC
CGAAGTTGTAGGAGACATTATACTTAAACCAGCAAATAATAGTTTAAAAATTACAGAAGAGGTTGGCCACACAGATCTAA
TGGCTGCTTATGTAGACAATTCTAGTCTTACTATTAAGAAACCTAATGAATTATCTAGAGTATTAGGTTTGAAAACCCTTGC
TACTCATGGTTTAGCTGCTGTTAATAGTGTCCCTTGGGATACTATAGCTAATTATGCTAAGCCTTTTCTTAACAAAGTTGTT
AGTACAACTACTAACATAGTTACACGGTGTTTAAACCGTGTTTGTACTAATTATATGCCTTATTTCTTTACTTTATTGCTACA
ATTGTGTACTTTTACTAGAAGTACAAATTCTAGAATTAAAGCATCTATGCCGACTACTATAGCAAAGAATACTGTTAAGAG
TGTCGGTAAATTTTGTCTAGAGGCTTCATTTAATTATTTGAAGTCACCTAATTTTTCTAAACTGATAAATATTATAATTTGGT
TTTTACTATTAAGTGTTTGCCTAGGTTCTTTAATCTACTCAACCGCTGCTTTAGGTGTTTTAATGTCTAATTTAGGCATGCCT
TCTTACTGTACTGGTTACAGAGAAGGCTATTTGAACTCTACTAATGTCACTATTGCAACCTACTGTACTGGTTCTATACCTT
GTAGTGTTTGTCTTAGTGGTTTAGATTCTTTAGACACCTATCCTTCTTTAGAAACTATACAAATTACCATTTCATCTTTTAAAT
GGGATTTAACTGCTTTTGGCTTAGTTGCAGAGTGGTTTTTGGCATATATTCTTTTCACTAGGTTTTTCTATGTACTTGGATTG
GCTGCAATCATGCAATTGTTTTTCAGCTATTTTGCAGTACATTTTATTAGTAATTCTTGGCTTATGTGGTTAATAATTAATCT
TGTACAAATGGCCCCGATTTCAGCTATGGTTAGAATGTACATCTTCTTTGCATCATTTTATTATGTATGGAAAAGTTATGTG
CATGTTGTAGACGGTTGTAATTCATCAACTTGTATGATGTGTTACAAACGTAATAGAGCAACAAGAGTCGAATGTACAACT
ATTGTTAATGGTGTTAGAAGGTCCTTTTATGTCTATGCTAATGGAGGTAAAGGCTTTTGCAAACTACACAATTGGAATTGT
GTTAATTGTGATACATTCTGTGCTGGTAGTACATTTATTAGTGATGAAGTTGCGAGAGACTTGTCACTACAGTTTAAAAGA
CCAATAAATCCTACTGACCAGTCTTCTTACATCGTTGATAGTGTTACAGTGAAGAATGGTTCCATCCATCTTTACTTTGATA
AAGCTGGTCAAAAGACTTATGAAAGACATTCTCTCTCTCATTTTGTTAACTTAGACAACCTGAGAGCTAATAACACTAAAG
GTTCATTGCCTATTAATGTTATAGTTTTTGATGGTAAATCAAAATGTGAAGAATCATCTGCAAAATCAGCGTCTGTTTACTA
CAGTCAGCTTATGTGTCAACCTATACTGTTACTAGATCAGGCATTAGTGTCTGATGTTGGTGATAGTGCGGAAGTTGCAGT
TAAAATGTTTGATGCTTACGTTAATACGTTTTCATCAACTTTTAACGTACCAATGGAAAAACTCAAAACACTAGTTGCAACT
GCAGAAGCTGAACTTGCAAAGAATGTGTCCTTAGACAATGTCTTATCTACTTTTATTTCAGCAGCTCGGCAAGGGTTTGTT
GÅTTCAGATGTAGAAACTAAAGATGTTGTTGAATGTCTTAAATTGTCACATCAATCTGACATAGAAGTTACTGGCGATAGT
TGTAATAACTATATGCTCACCTATAACAAAGTTGAAAACATGACACCCCGTGACCTTGGTGCTTGTATTGACTGTAGTGCG
CGTCATATTAATGCGCAGGTAGCAAAAAGTCACAACATTGCTTTGATATGGAACGTTAAAGATTTCATGTCATTGTCTGAA
CAACTACGAAAACAAATACGTAGTGCTGCTAAAAAGAATAACTTACCTTTTAAGTTGACATGTGCAACTACTAGACAAGTT
GTTAATGTTGTAACAACAAAGATAGCACTTAAGGGTGGTAAAATTGTTAATAATTGGTTGAAGCAGTTAATTAAAGTTACA
CTTGTGTTCCTTTTTGTTGCTGCTATTTTCTATTTAATAACACCTGTTCATGTCATGTCTAAACATACTGACTTTTCAAGTGAA
ATCATAGGATACAAGGCTATTGATGGTGGTGTCACTCGTGACATAGCATCTACAGATACTTGTTTTGCTAACAAACATGCT
GATTTTGACACATGGTTTAGCCAGCGTGGTGGTAGTTATACTAATGACAAAGCTTGCCCATTGATTGCTGCAGTCATAACA
AGAGAAGTGGGTTTTGTCGTGCCTGGTTTGCCTGGCACGATATTACGCACAACTAATGGTGACTTTTTGCATTTCTTACCTA
GAGTTTTTAGTGCAGTTGGTAACATCTGTTACACACCATCAAAACTTATAGAGTACACTGACTTTGCAACATCAGCTTGTGT
TTTGGCTGCTGAATGTACAATTTTTAAAGATGCTTCTGGTAAGCCAGTACCATATTGTTATGATACCAATGTACTAGAAGGT
TCTGTTGCTTATGAAAGTTTACGCCCTGACACACGTTATGTGCTCATGGATGGCTCTATTATTCAATTTCCTAACACCTACCT
TGAAGGTTCTGTTAGAGTGGTAACAACTTTTGATTCTGAGTACTGTAGGCACGGCACTTGTGAAAGATCAGAAGCTGGTG
TTTGTGTATCTACTAGTGGTAGATGGGTACTTAACAATGATTATTACAGATCTTTACCAGGAGTTTTCTGTGGTGTAGATGC
TGTAAATTTACTTACTAATATGTTTACACCACTAATTCAACCTATTGGTGCTTTGGACATATCAGCATCTATAGTAGCTGGT
GGTATTGTAGCTATCGTAGTAACATGCCTTGCCTACTATTTTATGAGGTTTAGAAGAGCTTTTGGTGAATACAGTCATGTA
GTTGCCTTTAATACTTTACTATTCCTTATGTCATTCACTGTACTCTGTTTAACACCAGTTTACTCATTCTTACCTGGTGTTTATT
CTGTTATTTACTTGTACTTGACATTTTATCTTACTAATGATGTTTCTTTTTTAGCACATATTCAGTGGATGGTTATGTTCACAC
CTTTAGTACCTTTCTGGATAACAATTGCTTATATCATTTGTATTTCCACAAAGCATTTCTATTGGTTCTTTAGTAATTACCTAA
AGAGACGTGTAGTCTTTAATGGTGTTTCCTTTAGTACTTTTGAAGAAGCTGCGCTGTGCACCTTTTTGTTAAATAAAGAAAT
GTATCTAAAGTTGCGTAGTGATGTGCTATTACCTCTTACGCAATATAATAGATACTTAGCTCTTTATAATAAGTACAAGTAT
TTTAGTGGAGCAATGGATACAACTAGCTACAGAGAAGCTGCTTGTTGTCATCTCGCAAAGGCTCTCAATGACTTCAGTAAC
TCAGGTTCTGATGTTCTTTACCAACCACCACAAACCTCTATCACCTCAGCTGTTTTGCAGAGTGGTTTTAGAAAAATGGCAT
TCCCATCTGGTAAAGTTGAGGGTTGTATGGTACAAGTAACTTGTGGTACAACTACACTTAACGGTCTTTGGCTTGATGACG
TAGTTTACTGTCCAAGACATGTGATCTGCACCTCTGAAGACATGCTTAACCCTAATTATGAAGATTTACTCATTCGTAAGTC
TAATCATAATTTCTTGGTACAGGCTGGTAATGTTCAACTCAGGGTTATTGGACATTCTATGCAAAATTGTGTACTTAAGCTT
AAGGTTGATACAGCCAATCCTAAGACACCTAAGTATAAGTTTGTTCGCATTCAACCAGGACAGACTTTTTCAGTGTTAGCT
TGTTACAATGGTTCACCATCTGGTGTTTACCAATGTGCTATGAGGCCCAATTTCACTATTAAGGGTTCATTCCTTAATGGTT
CATGTGGTAGTGTTGGTTTTAACATAGATTATGACTGTGTCTCTTTTTGTTACATGCACCATATGGAATTACCAACTGGAGT
TCATGCTGGCACAGACTTAGAAGGTAACTTTTATGGACCTTTTGTTGACAGGCAAACAGCACAAGCAGCTGGTACGGACA
CAACTATTACAGTTAATGTTTTAGCTTGGTTGTACGCTGCTGTTATAAATGGAGACAGGTGGTTTCTCAATCGATTTACCAC
AACTCTTAATGACTTTAACCTTGTGGCTATGAAGTACAATTATGAACCTCTAACACAAGACCATGTTGACATACTAGGACCT
CTTTCTGCTCAAACTGGAATTGCCGTTTTAGATATGTGTGCTTCATTAAAAGAATTACTGCAAAATGGTATGAATGGACGT
ACCATATTGGGTAGTGCTTTATTAGAAGATGAATTTACACCTTTTGATGTTGTTAGACAATGCTCAGGTGTTACTTTCCAAA
GTGCAGTGAAAAGAACAATCAAGGGTACACACCACTGGTTGTTACTCACAATTTTGACTTCACTTTTAGTTTTAGTCCAGA
GTACTCAATGGTCTTTGTTCTTTTTTTTGTATGAAAATGCCTTTTTACCTTTTGCTATGGGTATTATTGCTATGTCTGCTTTTG
CAATGATGTTTGTCAAACATAAGCATGCATTTCTCTGTTTGTTTTTGTTACCTTCTCTTGCCACTGTAGCTTATTTTAATATGG
TCTATATGCCTGCTAGTTGGGTGATGCGTATTATGACATGGTTGGATATGGTTGATACTAGTTTGTCTGGTTTTAAGCTAA
AAGACTGTGTTATGTATGCATCAGCTGTAGTGTTACTAATCCTTATGACAGCAAGAACTGTGTATGATGATGGTGCTAGGA
GAGTGTGGACACTTATGAATGTCTTGACACTCGTTTATAAAGTTTATTATGGTAATGCTTTAGATCAAGCCATTTCCATGTG
GGCTCTTATAATCTCTGTTACTTCTAACTACTCAGGTGTAGTTACAACTGTCATGTTTTTGGCCAGAGGTATTGTTTTTATGT
GTGTTGAGTATTGCCCTATTTTCTTCATAACTGGTAATACACTTCAGTGTATAATGCTAGTTTATTGTTTCTTAGGCTATTTTT
GTACTTGTTACTTTGGCCTCTTTTGTTTACTCAACCGCTACTTTAGACTGACTCTTGGTGTTTATGATTACTTAGTTTCTACAC
AGGAGTTTAGATATATGAATTCACAGGGACTACTCCCACCCAAGAATAGCATAGATGCCTTCAAACTCAACATTAAATTGT
TGGGTGTTGGTGGCAAACCTTGTATCAAAGTAGCCACTGTACAGTCTAAAATGTCAGATGTAAAGTGCACATCAGTAGTC
TTACTCTCAGTTTTGCAACAACTCAGAGTAGAATCATCATCTAAATTGTGGGCTCAATGTGTCCAGTTACACAATGACATTC
TCTTAGCTAAAGATACTACTGAAGCCTTTGAAAAAATGGTTTCACTACTTTCTGTTTTGCTTTCCATGCAGGGTGCTGTAGA
CATAAACAAGCTTTGTGAAGAAATGCTGGACAACAGGGCAACCTTACAAGCTATAGCCTCAGAGTTTAGTTCCCTTCCATC
ATATGCAGCTTTTGCTACTGCTCAAGAAGCTTATGAGCAGGCTGTTGCTAATGGTGATTCTGAAGTTGTTCTTAAAAAGTT
GAAGAAGTCTTTGAATGTGGCTAAATCTGAATTTGACCGTGATGCAGCCATGCAACGTAAGTTGGAAAAGATGGCTGATC
AAGCTATGACCCAAATGTATAAACAGGCTAGATCTGAGGACAAGAGGGCAAAAGTTACTAGTGCTATGCAGACAATGCTT
TTCACTATGCTTAGAAAGTTGGATAATGATGCACTCAACAACATTATCAACAATGCAAGAGATGGTTGTGTTCCCTTGAAC
ATAATACCTCTTACAACAGCAGCCAAACTAATGGTTGTCATACCAGACTATAACACATATAAAAATACGTGTGATGGTACA
ACATTTACTTATGCATCAGCATTGTGGGAAATCCAACAGGTTGTAGATGCAGATAGTAAAATTGTTCAACTTAGTGAAATT
AGTATGGACAATTCACCTAATTTAGCATGGCCTCTTATTGTAACAGCTTTAAGGGCCAATTCTGCTGTCAAATTACAGAATA
ATGAGCTTAGTCCTGTTGCACTACGACAGATGTCTTGTGCTGCCGGTACTACACAAACTGCTTGCACTGATGACAATGCGT
TAGCTTACTACAACACAACAAAGGGAGGTAGGTTTGTACTTGCACTGTTATCCGATTTACAGGATTTGAAATGGGCTAGAT
TCCCTAAGAGTGATGGAACTGGTACTATCTATACAGAACTGGAACCACCTTGTAGGTTTGTTACAGACACACCTAAAGGTC
CTAAAGTGAAGTATTTATACTTTATTAAAGGATTAAACAACCTAAATAGAGGTATGGTACTTGGTAGTTTAGCTGCCACAG
TACGTCTACAAGCTGGTAATGCAACAGAAGTGCCTGCCAATTCAACTGTATTATCTTTCTGTGCTTTTGCTGTAGATGCTGC
TAAAGCTTACAAAGATTATCTAGCTAGTGGGGGACAACCAATCACTAATTGTGTTAAGATGTTGTGTACACACACTGGTAC
TGGTCAGGCAATAACAGTTACACCGGAAGCCAATATGGATCAAGAATCCTTTGGTGGTGCATCGTGTTGTCTGTACTGCC
GTTGCCACATAGATCATCCAAATCCTAAAGGATTTTGTGACTTAAAAGGTAAGTATGTACAAATACCTACAACTTGTGCTA
ATGACCCTGTGGGTTTTACACTTAAAAACACAGTCTGTACCGTCTGCGGTATGTGGAAAGGTTATGGCTGTAGTTGTGATC
AACTCCGCGAACCCATGCTTCAGTCAGCTGATGCACAATCGTTTTTAAACGGGTTTGCGGTGTAAGTGCAGCCCGTCTTAC
ACCGTGCGGCACAGGCACTAGTACTGATGTCGTATACAGGGCTTTTGACATCTACAATGATAAAGTAGCTGGTTTTGCTAA
ATTCCTAAAAACTAATTGTTGTCGCTTCCAAGAAAAGGACGAAGATGACAATTTAATTGATTCTTACTTTGTAGTTAAGAG
ACACACTTTCTCTAACTACCAACATGAAGAAACAATTTATAATTTACTTAAGGATTGTCCAGCTGTTGCTAAACATGACTTC
TTTAAGTTTAGAATAGACGGTGACATGGTACCACATATATCACGTCAACGTCTTACTAAATACACAATGGCAGACCTCGTC
TATGCTTTAAGGCATTTTGATGAAGGTAATTGTGACACATTAAAAGAAATACTTGTCACATACAATTGTTGTGATGATGAT
TATTTCAATAAAAAGGACTGGTATGATTTTGTAGAAAACCCAGATATATTACGCGTATACGCCAACTTAGGTGAACGTGTA
CGCCAAGCTTTGTTAAAAACAGTACAATTCTGTGATGCCATGCGAAATGCTGGTATTGTTGGTGTACTGACATTAGATAAT
CAAGATCTCAATGGTAACTGGTATGATTTCGGTGATTTCATACAAACCACGCCAGGTAGTGGAGTTCCTGTTGTAGATTCT
TATTATTCATTGTTAATGCCTATATTAACCTTGACCAGGGCTTTAACTGCAGAGTCACATGTTGACACTGACTTAACAAAGC
CTTACATTAAGTGGGATTTGTTAAAATATGACTTCACGGAAGAGAGGTTAAAACTCTTTGACCGTTATTTTAAATATTGGG
ATCAGACATACCACCCAAATTGTGTTAACTGTTTGGATGACAGATGCATTCTGCATTGTGCAAACTTTAATGTTTTATTCTC
TACAGTGTTCCCACTTACAAGTTTTGGACCACTAGTGAGAAAAATATTTGTTGATGGTGTTCCATTTGTAGTTTCAACTGGA
TACCACTTCAGAGAGCTAGGTGTTGTACATAATCAGGATGTAAACTTACATAGCTCTAGACTTAGTTTTAAGGAATTACTT
GTGTATGCTGCTGACCCTGCTATGCACGCTGCTTCTGGTAATCTATTACTAGATAAACGCACTACGTGCTTTTCAGTAGCTG
CACTTACTAACAATGTTGCTTTTCAAACTGTCAAACCCGGTAATTTTAACAAAGACTTCTATGACTTTGCTGTGTCTAAGGG
TTTCTTTAAGGAAGGAAGTTCTGTTGAATTAAAACACTTCTTCTTTGCTCAGGATGGTAATGCTGCTATCAGCGATTATGAC
TACTATCGTTATAATCTACCAACAATGTGTGATATCAGACAACTACTATTTGTAGTTGAAGTTGTTGATAAGTACTTTGATT
GTTACGATGGTGGCTGTATTAATGCTAACCAAGTCATCGTCAACAACCTAGACAAATCAGCTGGTTTTCCATTTAATAAAT
GGGGTAAGGCTAGACTTTATTATGATTCAATGAGTTATGAGGATCAAGATGCACTTTTCGCATATACAAAACGTAATGTCA
TCCCTACTATAACTCAAATGAATCTTAAGTATGCCATTAGTGCAAAGAATAGAGCTCGCACCGTAGCTGGTGTCTCTATCT
GTAGTACTATGACCAATAGACAGTTTCATCAAAAATTATTGAAATCAATAGCCGCCACTAGAGGAGCTACTGTAGTAATTG
GAACAAGCAAATTCTATGGTGGTTGGCACAACATGTTAAAAACTGTTTATAGTGATGTAGAAAACCCTCACCTTATGGGTT
GGGATTATCCTAAATGTGATAGAGCCATGCCTAACATGCTTAGAATTATGGCCTCACTTGTTCTTGCTCGCAAACATACAA
CGTGTTGTAGCTTGTCACACCGTTTCTATAGATTAGCTAATGAGTGTGCTCAAGTATTGAGTGAAATGGTCATGTGTGGCG
GTTCACTATATGTTAAACCAGGTGGAACCTCATCAGGAGATGCCACAACTGCTTATGCTAATAGTGTTTTTAACATTTGTCA
AGCTGTCACGGCCAATGTTAATGCACTTTTATCTACTGATGGTAACAAAATTGCCGATAAGTATGTCCGCAATTTACAACA
CAGACTTTATGAGTGTCTCTATAGAAATAGAGATGTTGACACAGACTTTGTGAATGAGTTTTACGCATATTTGCGTAAACA
TTTCTCAATGATGATACTCTCTGACGATGCTGTTGTGTGTTTCAATAGCACTTATGCATCTCAAGGTCTAGTGGCTAGCATA
AAGAACTTTAAGTCAGTTCTTTATTATCAAAACAATGTTTTTATGTCTGAAGCAAAATGTTGGACTGAGACTGACCTTACTA
AAGGACCTCATGAATTTTGCTCTCAACATACAATGCTAGTTAAACAGGGTGATGATTATGTGTACCTTCCTTACCCAGATCC
ATCAAGAATCCTAGGGGCCGGCTGTTTTGTAGATGATATCGTAAAAACAGATGGTACACTTATGATTGAACGGTTCGTGT
CTTTAGCTATAGATGCTTACCCACTTACTAAACATCCTAATCAGGAGTATGCTGATGTCTTTCATTTGTACTTACAATACATA
AGAAAGCTACATGATGAGTTAACAGGACACATGTTAGACATGTATTCTGTTATGCTTACTAATGATAACACTTCAAGGTAT
TGGGAACCTGAGTTTTATGAGGCTATGTACACACCGCATACAGTCTTACAGGCTGTTGGGGCTTGTGTTCTTTGCAATTCA
CAGACTTCATTAAGATGTGGTGCTTGCATACGTAGACCATTCTTATGTTGTAAATGCTGTTACGACCATGTCATATCAACAT
CACATAAATTAGTCTTGTCTGTTAATCCGTATGTTTGCAATGCTCCAGGTTGTGATGTCACAGATGTGACTCAACTTTACTT
AGGAGGTATGAGCTATTATTGTAAATCACATAAACCACCCATTAGTTTTCCATTGTGTGCTAATGGACAAGTTTTTGGTTTA
TATAAAAATACATGTGTTGGTAGCGATAATGTTACTGACTTTAATGCAATTGCAACATGTGACTGGACAAATGCTGGTGAT
TACATTTTAGCTAACACCTGTACTGAAAGACTCAAGCTTTTTGCAGCAGAAACGCTCAAAGCTACTGAGGAGACATTTAAA
CTGTCTTATGGTATTGCTACTGTACGTGAAGTGCTGTCTGACAGAGAATTACATCTTTCATGGGAAGTTGGTAAACCTAGA
CCACCACTTAACCGAAATTATGTCTTTACTGGTTATCGTGTAACTAAAAACAGTAAAGTACAAATAGGAGAGTACACCTTT
GAAAAAGGTGACTATGGTGATGCTGTTGTTTACCGAGGTACAACAACTTACAAATTAÅATGTTGGTGATTATTTTGTGCTG
ACATCACATACAGTAATGCCATTAAGTGCACCTACACTAGTGCCACAAGAGCACTATGTTAGAATTACTGGCTTATACCCA
ACACTCAATATCTCAGATGAGTTTTCTAGCAATGTTGCAAATTATCAAAAGGTTGGTATGCAAAAGTATTCTACACTCCAG
GGACCACCTGGTACTGGTAAGAGTCATTTTGCTATTGGCCTAGCTCTCTACTACCCTTCTGCTCGCATAGTGTATACAGCTT
GCTCTCATGCCGCTGTTGATGCACTATGTGAGAAGGCATTAAAATATTTGCCTATAGATAAATGTAGTAGAATTATACCTG
CACGTGCTCGTGTAGAGTGTTTTGATAAATTCAAAGTGAATTCAACATTAGAACAGTATGTCTTTTGTACTGTAAATGCATT
GCCTGAGACGACAGCAGATATAGTTGTCTTTGATGAAATTTCAATGGCCACAAATTATGATTTGAGTGTTGTCAATGCCAG
ATTACGTGCTAAGCACTATGTGTACATTGGCGACCCTGCTCAATTACCTGCACCACGCACATTGCTAACTAAGGGCACACT
AGAACCAGAATATTTCAATTCAGTGTGTAGACTTATGAAAACTATAGGTCCAGACATGTTCCTCGGAACTTGTCGGCGTTG
TCCTGCTGAAATTGTTGACACTGTGAGTGCTTTGGTTTATGATAATAAGCTTAAAGCACATAAAGACAAATCAGCTCAATG
CTTTAAAATGTTTTATAAGGGTGTTATCACGCATGATGTTTCATCTGCAATTAACAGGCCACAAATAGGCGTGGTAAGAGA
ATTCCTTACACGTAACCCTGCTTGGAGAAAAGCTGTCTTTATTTCACCTTATAATTCACAGAATGCTGTAGCCTCAAAGATT
TTGGGACTACCAACTCAAACTGTTGATTCATCACAGGGCTCAGAATATGACTATGTCATATTCACTCAAACCACTGAAACA
GCTCACTCTTGTAATGTAAACAGATTTAATGTTGCTATTACCAGAGCAAAAGTAGGCATACTTTGCATAATGTCTGATAGA
GACCTTTATGACAAGTTGCAATTTACAAGTCTTGAAATTCCACGTAGGAATGTGGCAACTTTACAAGCTGAAAATGTAACA
GGACTCTTTAAAGATTGTAGTAAGGTAATCACTGGGTTACATCCTACACAGGCACCTACACACCTCAGTGTTGACACTAAA
TTCAAAACTGAAGGTTTATGTGTTGACATACCTGGCATACCTAAGGACATGACCTATAGAAGACTCATCTCTATGATGGGT
TTTAAAATGAATTATCAAGTTAATGGTTACCCTAACATGTTTATCACCCGCGAAGAAGCTATAAGACATGTACGTGCATGG
ATTGGCTTCGATGTCGAGGGGTGTCATGCTACTAGAGAAGCTGTTGGTACCAATTTACCTTTACAGCTAGGTTTTTCTACA
GGTGTTAACCTAGTTGCTGTACCTACAGGTTATGTTGATACACCTAATAATACAGATTTTTCCAGAGTTAGTGCTAAACCAC
CGCCTGGAGATCAATTTAAACACCTCATACCACTTATGTACAAAGGACTTCCTTGGAATGTAGTGCGTATAAAGATTGTAC
AAATGTTAAGTGACACACTTAAAAATCTCTCTGACAGAGTCGTATTTGTCTTATGGGCACATGGCTTTGAGTTGACATCTAT
GAAGTATTTTGTGAAAATAGGACCTGAGCGCACCTGTTGTCTATGTGATAGACGTGCCACATGCTTTTCCACTGCTTCAGA
CACTTATGCCTGTTGGCATCATTCTATTGGATTTGATTACGTCTATAATCCGTTTATGATTGATGTTCAACAATGGGGTTTTA
CAGGTAACCTACAAAGCAACCATGATCTGTATTGTCAAGTCCATGGTAATGCACATGTAGCTAGTTGTGATGCAATCATGA
CTAGGTGTCTAGCTGTCCACGAGTGCTTTGTTAAGCGTGTTGACTGGACTATTGAATATCCTATAATTGGTGATGAACTGA
AGATTAATGCGGCTTGTAGAAAGGTTCAACACATGGTTGTTAAAGCTGCATTATTAGCAGACAAATTCCCAGTTCTTCACG
ACATTGGTAACCCTAAAGCTATTAAGTGTGTACCTCAAGCTGATGTAGAATGGAAGTTCTATGATGCACAGCCTTGTAGTG
ACAAAGCTTATAAAATAGAAGAATTATTCTATTCTTATGCCACACATTCTGACAAATTCACAGATGGTGTATGCCTATTTTG
GAATTGCAATGTCGATAGATATCCTGCTAATTCCATTGTTTGTAGATTTGACACTAGAGTGCTATCTAACCTTAACTTGCCT
GGTTGTGATGGTGGCAGTTTGTATGTAAATAAACATGCATTCCACACACCAGCTTTTGATAAAAGTGCTTTTGTTAATTTAA
AACAATTACCATTTTTCTATTACTCTGACAGTCCATGTGAGTCTCATGGAAAACAAGTAGTGTCAGATATAGATTATGTACC
ACTAAAGTCTGCTACGTGTATAACACGTTGCAATTTAGGTGGTGCTGTCTGTAGACATCATGCTAATGAGTACAGATTGTA
TCTCGATGCTTATAACATGATGATCTCAGCTGGCTTTAGCTTGTGGGTTTACAAACAATTTGATACTTATAACCTCTGGAAC
ACTTTTACAAGACTTCAGAGTTTAGAAAATGTGGCTTTTAATGTTGTAAATAAGGGACACTTTGATGGACAACAGGGTGA
AGTACCAGTTTCTATCATTAATAACACTGTTTACACAAAAGTTGATGGTGTTGATGTAGAATTGTTTGAAAATAAAACAAC
ATTACCTGTTAATGTAGCATTTGAGCTTTGGGCTAAGCGCAACATTAAACCAGTACCAGAGGTGAAAATACTCAATAATTT
GGGTGTGGACATTGCTGCTAATACTGTGATCTGGGACTACAAAAGAGATGCTCCAGCACATATATCTACTATTGGTGTTTG
TTCTATGACTGACATAGCCAAGAAACCAACTGAAACGATTTGTGCACCACTCACTGTCTTTTTTGATGGTAGAGTTGATGG
TCAAGTAGACTTATTTAGAAATGCCCGTAATGGTGTTCTTATTACAGAAGGTAGTGTTAAAGGTTTACAACCATCTGTAGG
TCCCAAACAAGCTAGTCTTAATGGAGTCACATTAATTGGAGAAGCCGTAAAAACACAGTTCAATTATTATAAGAAAGTTGA
TGGTGTTGTCCAACAATTACCTGAAACTTACTTTACTCAGAGTAGAAATTTACAAGAATTTAAACCCAGGAGTCAAATGGA
AATTGATTTCTTAGAATTAGCTATGGATGAATTCATTGAACGGTATAAATTAGAAGGCTATGCCTTCGAACATATCGTTTAT
GGAGATTTTAGTCATAGTCAGTTAGGTGGTTTACATCTACTGATTGGACTAGCTAAACGTTTTAAGGAATCACCTTTTGAA
TTAGAAGATTTTATTCCTATGGACAGTACAGTTAAAAACTATTTCATAACAGATGCGCAAACAGGTTCATCTAAGTGTGTG
TGTTCTGTTATTGATTTATTACTTGATGATTTTGTTGAAATAATAAAATCCCAAGATTTATCTGTAGTTTCTAAGGTTGTCAA
AGTGACTATTGACTATACAGAAATTTCATTTATGCTTTGGTGTAAAGATGGCCATGTAGAAACATTTTACCCAAAATTACAA
TCTAGTCAAGCGTGGCAACCGGGTGTTGCTATGCCTAATCTTTACAAAATGCAAAGAATGCTATTAGAAAAGTGTGACCTT
CAAAATTATGGTGATAGTGCAACATTACCTAAAGGCATAATGATGAATGTCGCAAAATATACTCAACTGTGTCAATATTTA
AACACATTAACATTAGCTGTACCCTATAATATGAGAGTTATACATTTTGGTGCTGGTTCTGATAAAGGAGTTGCACCAGGT
ACAGCTGTTTTAAGACAGTGGTTGCCTACGGGTACGCTGCTTGTCGATTCAGATCTTAATGACTTTGTCTCTGATGCAGATT
CAACTTTGATTGGTGATTGTGCAACTGTACATACAGCTAATAAATGGGATCTCATTATTAGTGATATGTACGACCCTAAGA
CTAAAAATGTTACAAAAGAAAATGACTCTAAAGAGGGTTTTTTCACTTACATTTGTGGGTTTATACAACAAAAGCTAGCTC
TTGGAGGTTCCGTGGCTATAAAGATAACAGAACATTCTTGGAATGCTGATCTTTATAAGCTCATGGGACACTTCGCATGGT
GGACAGCCTTTGTTACTAATGTGAATGCGTCATCATCTGAAGCATTTTTAATTGGATGTAATTATCTTGGCAAACCACGCG
AACAAATAGATGGTTATGTCATGCATGCAAATTACATATTTTGGAGGAATACAAATCCAATTCAGTTGTCTTCCTATTCTTT
ATTTGACATGAGTAAATTTCCCCTTAAATTAAGGGGTACTGCTGTTATGTCTTTAAAAGAAGGTCAAATCAATGATATGATT
TTATCTCTTCTTAGTAAAGGTAGACTTATAATTAGAGAAAACAACAGAGTTGTTATTTCTAGTGATGTTCTTGTTAACAACT
AAACGAACAATGTTTGTTTTTCTTGTTTTATTGCCACTAGTCTCTAGTCAGTGTGTTAATCTTACAACCAGAACTCAATTACC
CCCTGCATACACTAATTCTTTCACACGTGGTGTTTATTACCCTGACAAAGTTTTCAGATCCTCAGTTTTACATTCAACTCAGG
ACTTGTTCTTACCTTTCTTTTCCAATGTTACTTGGTTCCATGCTATACATGTCTCTGGGACCAATGGTACTAAGAGGTTTGAT
AACCCTGTCCTACCATTTAATGATGGTGTTTATTTTGCTTCCACTGAGAAGTCTAACATAATAAGAGGCTGGATTTTTGGTA
CTACTTTAGATTCGAAGACCCAGTCCCTACTTATTGTTAATAACGCTACTAATGTTGTTATTAAAGTCTGTGAATTTCAATTT
TGTAATGATCCATTTTTGGGTGTTTATTACCACAAAAACAACAAAAGTTGGATGGAAAGTGAGTTCAGAGTTTATTCTAGT
GCGAATAATTGCACTTTTGAATATGTCTCTCAGCCTTTTCTTATGGACCTTGAAGGAAAACAGGGTAATTTCAAAAATCTTA
GGGAATTTGTGTTTAAGAATATTGATGGTTATTTTAAAATATATTCTAAGCACACGCCTATTAATTTAGTGCGTGATCTCCC
TCAGGGTTTTTCGGCTTTAGAACCATTGGTAGATTTGCCAATAGGTATTAACATCACTAGGTTTCAAACTTTACTTGCTTTA
CATAGAAGTTATTTGACTCCTGGTGATTCTTCTTCAGGTTGGACAGCTGGTGCTGCAGCTTATTATGTGGGTTATCTTCAAC
CTAGGACTTTTCTATTAAAATATAATGAAAATGGAACCATTACAGATGCTGTAGACTGTGCACTTGACCCTCTCTCAGAAA
CAAAGTGTACGTTGAAATCCTTCACTGTAGAAAAAGGAATCTATCAAACTTCTAACTTTAGAGKCCAACCAACAGAATCTA
TTGTTAGATTTCCTAATATTACAAACTTGTGCCCTTTTGGTGAAGTTTTTAACGCCACCAGATTTGCATCTGTTTATGCTTGG
AACAGGAAGAGAATCAGCAACTGTGTTGCTGATTATTCTGTCCTATATAATTCCGCATCATTTTCCACTTTTAAGTGTTATG
GAGTGTCTCCTACTAAATTAAATGATCTCTGCTTTACTAATGTCTATGCAGATTCATTTGTAATTAGAGGTGATGAAGTCAG
ACAAATCGCTCCAGGGCAAACTGGAAAGATTGCTGATTATAATTATAAATTACCAGATGATTTTACAGGCTGCGTTATAGC
TTGGAATTCTAACAATCTTGATTCTAAGGTTGGTGGTAATTATAATTACCTGTATAGATTGTTTAGGAAGTCTAATCTCAAA
CCTTTTGAGAGAGATATTTCAACTGAAATCTATCAGGCCGGTAGCACACCTTGTAATGGTGTTGAAGGTTTTAATTGTTAC
TTTCCTTTACAATCATATGGTTTCCAACCCACTAATGGTGTTGGTTACCAACCATACAGAGTAGTAGTACTTTCTTTTGAACT
TCTACATGCACCAGCAACTGTTTGTGGACCTAAAAAGTCTACTAATTTGGTTAAAAACAAATGTGTCAATTTCAACTTCAAT
GGTTTAACAGGCACAGGTGTTCTTACTGAGTCTAACAAAAAGTTTCTGCCTTTCCAACAATTTGGCAGAGACATTGCTGAC
ACTACTGATGCTGTCCGTGATCCACAGACACTTGAGATTCTTGACATTACACCATGTTCTTTTGGTGGTGTCAGTGTTATAA
CACCAGGAACAAATACTTCTAACCAGGTTGCTGTTCTTTATCAGGGTGTTAACTGCACAGAAGTCCCTGTTGCTATTCATGC
AGATCAACTTACTCCTACTTGGCGTGTTTATTCTACAGGTTCTAATGTTTTTCAAACACGTGCAGGCTGTTTAATAGGGGCT
GAACATGTCAACAACTCATATGAGTGTGACATACCCATTGGTGCAGGTATATGCGCTAGTTATCAGACTCAGACTAATTCT
CCTCGGCGGGCACGTAGTGTAGCTAGTCAATCCATCATTGCCTACACTATGTCACTTGGTGCAGAAAATTCAGTTGCTTAC
TCTRATAACTCTATTGCCATACCCACAAATTTTACTATTAGTGTTACCACAGAAATTCTACCAGTGTCTATGACCAAGACATC
AGTAGATTGTACAATGTACATTTGTGGTGATTCAACTGAATGCAGCAATCTTTTGTTGCAATATGGCAGTTTTTGTACACAA
TTAAACCGTGCTTTAACTGGAATAGCTGTTGAACAAGACAAAAACACCCAAGAAGTTTTTGCACAAGTCAAACAAATTTAC
AAAACACCACCAATTAAAGATTTTGGTGGTTTTAATTTTTCACAAATATTACCAGATCCATCAAAACCAAGCAAGAGGTCAT
TTATTGAAGATCTACTTTTCAACAAAGTGACACTTGCAGATGCTGGCTTCATCAAACAATATGGTGATTGCCTTGGTGATAT
TGCTGCTAGAGACCTCATTTGTGCACAAAAGTTTAACGGCCTTACTGTTTTGCCACCTTTGCTCACAGATGAAATGATTGCT
CAATACACTTCTGCACTGTTAGCGGGTACAATCACTTCTGGTTGGACCTTTGGTGCAGGTGCTGCATTACAAATACCATTT
GCTATGCAAATGGCTTATAGGTTTAATGGTATTGGAGTTACACAGAATGTTCTCTATGAGAACCAAAAATTGATTGCCAAC
CAATTTAATAGTGCTATTGGCAAAATTCAAGACTCACTTTCTTCCACAGCAAGTGCACTTGGAAAACTTCAAGATGTGGTC
AACCAAAATGCACAAGCTTTAAACACGCTTGTTAAACAACTTAGCTCCAATTTTGGTGCAATTTCAAGTGTTTTAAATGATA
TCCTTTCACGTCTTGACAAAGTTGAGGCTGAAGTGCAAATTGATAGGTTGATCACAGGCAGACTTCAAAGTTTGCAGACAT
ATGTGACTCAACAATTAATTAGAGCTGCAGAAATCAGAGTTTCTGCTAATCTTGCTGCTACTAAAATGTCAGAGTGTGTAC
TTGGACAATCAAAAAGAGTTGATTTTTGTGGAAAGGGCTATCATCTTATGTCCTTCCCTCAGTCAGCACCTCATGGTGTAG
TCTTCTTGCATGTGACTTATGTCCCTGCACAAGAAAAGAACTTCACAACTGCTCCTGCCATTTGTCATGATGGAAAAGCACA
CTTTCCTCGTGAAGGTGTCTTTGTTTCAAATGGCACACACTGGTTTGTAACACAAAGGAATTTTTATGAACCACAAATCATT
ACTACAGACAACACATTTGTGTCTGGTAACTGTGATGTTGTAATAGGAATTGTCAACAACACAGTTTATGATCCTTTGCAA
CCTGAATTAGACTCATTCAAGGAGGAGTTAGATAAATATTTTAAGAATCATACATCACCAGATGTTGATTTAGGTGACATC
TCTGGCATTAATGCTTCAGTTGTAAACATTCAAAAAGAAATTGACCGCCTCAATGAGGTTGCCAAGAATTTAAATGAATCT
CTCATCGATCTCCAAGAACTTGGAAAGTATGAGCAGTATATAAAATGGCCATGGTACATTTGGCTAGGTTTTATAGCTGGC
TTGATTGCCATAGTAATGGTGACAATTATGCTTTGCTGTATGACCAGTTGCTGTAGTTGTCTCAAGGGCTGTTGTTCTTGTG
GATCCTGCTGCAAATTTGATGAAGACGACTCTGAGCCAGTGCTCAAAGGAGTCAAATTACATTACACATAAACGAACTTAT
GGATTTGTTTATGAGAATCTTCACAATTGGAACTGTAACTTTGAAGCAAGGTGAAATCAAGGATGCTACTCCTTCAGATTT
TGTTCGCGCTACTGCAACGATACCGATACAAGCCTCACTCCCTTTCGGATGGCTTATTGTTGGCGTTGCACTTCTTGCTGTT
TTTCAGAGCGCTTCCAAAATCATAACCCTCAAAAAGAGATGGCAACTAGCACTCTCCAAGGGTGTTCACTTTGTTTGCAAC
TTGCTGTTGTTGTTTGTAACAGTTTACTCACACCTTTTGCTCGTTGCTGCTGGCCTTGAAGCCCCTTTTCTCTATCTTTATGCT
TTAGTCTACTTCTTGCAGAGTATAAACTTTGTAAGAATAATAATGAGGCTTTGGCTTTGCTGGAAATGCCGTTCCAAAAAC
CCATTACTTTATGATGCCAACTATTTTCTTTGCTGGCATACTAATTGTTACGACTATTGTATACCTTACAATAGTGTAACTTC
TTCAATTGTCATTACTTCAGGTGATGGCACAACAAGTCCTATTTCTGAACATGACTACCAGATTGGTGGTTATACTGAAAA
ATGGGAATCTGGAGTAAAAGACTGTGTTGTATTACACAGTTACTTCACTTCAGACTATTACCAGCTGTACTCAACTCAATTG
AGTACAGACACTGGTGTTGAACATGTTACCTTCTTCATCTACAATAAAATTGTTGATGAGCCTGAAGAACATGTCCAAATT
CACACAATCGACGGTTCATCCGGAGTTGTTAATCCAGTAATGGAACCAATTTATGATGAACCGACGACGACTACTAGCGT
GCCTTTGTAAGCACAAGCTGATGAGTACGAACTTATGTACTCATTCGTTTCGGAAGAGMCAGGTACGTTAATAGTTAATA
GCGTACTTCTTTTTCTTGCTTTCGTGGTATTCTTGCTAGTTACACTAGCCATCCTTACTGCGCTTCGATTGTGTGCGTACTGC
TGCAATATTGTTAACGTGAGTCTTGTAAAACCTTCTTTTTACGTTTACTCTCGTGTTAAAAATCTGAATTCTTCTAGAGTTCC
TGATCTTCTGGTCTAAACGAACTAAATATTATATTAGTTTTTCTGTTTGGAACTTTAATTTTAGCCATGGCAGATTCCAACG
GTACTATTACCGTTGAAGAGCTTAAAAAGCTCCTTGAACAATGGAACCTAGTAATAGGTTTCCTATTCCTTACATGGATTTG
TCTTCTACAATTTGCCTATGCCAACAGGAATAGGTTTTTGTATATAATTAAGTTAATTTTCCTCTGGCTGTTATGGCCAGTAA
CTTTAGCTTGTTTTGTGCTTGCTGCTGTTTACAGAATAAATTGGATCACCGGTGGAATTGCTATCGCAATGGCTTGTCTTGT
AGGCTTGATGTGGCTCAGCTACTTCATTGCTTCTTTCAGACTGTTTGCGCGTACGCGTTCCATGTGGTCATTCAATCCAGAA
ACTAACATTCTTCTCAACGTGCCACTCCATGGCACTATTCTGACCAGACCGCTTCTAGAAAGTGAACTCGTAATCGGAGCT
GTGATCCTTCGTGGACATCTTCGTATTGCTGGACACCATCTAGGACGCTGTGACATCAAGGACCTGCCTAAAGAAATCACT
GTTGCTACATCACGAATGCTTTCTTATTACAAATTGGGAGCTTCGCAGCGTGTAGCAGGTGACTCAGGTTTTGCTGCATAC
AGTCGCTACAGGATTGGCAACTATAAATTAAACACAGACCATTCCAGTAGCAGTGACAATATTGCTTTGCTTGTACAGTAA
GTGACAACAGATGTTTCATCTCGTTGACTTTCAGGTTACTATAGCAGAGATATTACTAATTATTATGAGGACTTTTAAAGTT
TCCATTTGGAATCTTGATTACATCATAAACCTCATAATTAAAAATTTATCTAAGTCACTAACTGAGAATAAATATTCTCAATT
AGATGAAGAGCAACCAATGGAGATTGATTAAACGAACATGAAAATTATTCTTTTCTTGGCACTGATAACACTCGCTACTTG
TGAGCTTTATCACTACCAAGAGTGTGTTAGAGGTACAACAGTACTTTTAAAAGAACCTTGCTCTTCTGGAACATACGAGGG
CAATTCACCATTTCATCCTCTAGCTGATAACAAATTTGCACTGACTTGCTTTAGCACTCAATTTGCTTTTGCTTGTCCTGACG
GCGTAAAACACGTCTATCAGTTACGTGCCAGATCAGTTTCACCTAAACTGTTCATCAGACAAGAGGAAGTTCAAGAACTTT
ACTCTCCAATTTTTCTTATTGTTGCGGCAATAGTGTTTATAACACTTTGCTTCACACTCAAAAGAAAGACAGAATGATTGAA
CTTTCATTAATTGACTTCTATTTGTGCTTTTTAGCCTTTCTGCTATTCCTTGTTTTAATTATGCTTATTATCTTTTGGTTCTCACT
TGAACTGCAAGATCATAATGAAACTTGTCACGCCTAAACGAACATGAAATTTCTTGTTTTCTTAGGAATCATCACAACTGTA
GCTGCATTTCACCAAGAATGTAGTTTACAGTCATGTACTCAACATCAACCATATGTAGTTGATGACCCGTGTCCTATTCACT
TCTATTCTAAATGGTATATTAGAGTAGGAGCTAGAAAATCAGCACCTTTAATTGAATTGTGCGTGGATGAGGCTGGTTCTA
AATCACCCATTCAGTACATCGATATCGGTAATTATACAGTTTCCTGTTTACCTTTTACAATTAATTGCCAGGAACCTAAATTG
GGTAGTCTTGTAGTGCGTTGTTCGTTCTATGAAGACTTTTTAGAGTATCATGACGTTCGTGTTGTTTTAGATTTCATCTAAA
CGAACAAACTAAAATGTCTGATAATGGACCCCAAAATCAGCGAAATGCACCCCGCATTACGTTTGGTGGACCCTCAGATTC
AACTGGCAGTAACCAGAATGGAGAACGCAGTGGGGCGCGATCAAAACAACGTCGGCCCCAAGGTTTACCCAATAATACT
GCGTCTTGGTTCACCGCTCTCACTCAACATGGCAAGGAAGACCTTAAATTCCCTCGAGGACAAGGCGTTCCAATTAACACC
AATAGCAGTCCAGATGACCAAATTGGCTACTACCGAAGAGCTACCAGACGAATTCGTGGTGGTGACGGTAAAATGAAAG
ATCTCAGTCCAAGATGGTATTTCTACTACCTAGGAACTGGGCCAGAAGCTGGACTTCCCTATGGTGCTAACAAAGACGGC
ATCATATGGGTTGCAACTGAGGGAGCCTTGAATACACCAAAAGATCACATTGGCACCCGCAATCCTGCTAACAATGCTGC
AATCGTGCTACAACTTCCTCAAGGAACAACATTGCCAAAAGGCTTCTACGCAGAAGGGAGCAGAGGCGGCAGTCAAGCC
TCTTCTCGTTCCTCATCACGTAGTCGCAACAGTTCAAGAAATTCAACTCCAGGCAGCAGTAAACGAACTTCTCCTGCTAGAA
TGGCTGGCAATGGCGGTGATGCTGCTCTTGCTTTGCTGCTGCTTGACAGATTGAACCAGCTTGAGAGCAAAATGTCTGGT
AAAGGCCAACAACAACAAGGCCAAACTGTCACTAAGAAATCTGCTGCTGAGGCTTCTAAGAAGCCTCGGCAAAAACGTAC
TGCCACTAAAGCATACAATGTAACACAAGCTTTCGGCAGACGTGGTCCAGAACAAACCCAAGGAAATTTTGGGGACCAGG
AACTAATCAGACAAGGAACTGATTACAAACATTGGCCGCAAATTGCACAATTTGCCCCCAGCGCTTCAGCGTTCTTCGGAA
TGTCGCGCATTGGCATGGAAGTCACACCTTCGGGAACGTGGTTGACCTACACAGGTGCCATCAAATTGGATGACAAAGAT
CCAAATTTCAAAGATCAAGTCATTTTGCTGAATAAGCATATTGACGCATACAAAACATTCCCACCAACAGAGCCTAAAAAG
GACAAAAAGAAGAAGGCTGATGAAACTCAAGCCTTACCGCAGAGACAGAAGAAACAGCAAACTGTGACTCTTCTTCCTGC
TGCAGATTTGGATGATTTCTCCAAACAATTGCAACAATCCATGAGCAGTGCTGACTCAACTCAGGCCTAAACTCATGCAGA
CCACACAAGGCAGATGGGCTATATAAACGTTTTCGCTTTTCCGTTTACGATATATAGTCTACTCTTGTGCAGAATGAATTCT
CGTAACTACATAGCACAAGTAGATGTAGTTAACTTTAATCTCACATAGCAATCTTTAATCAGTGTGTAACATTAGGGAGGA
CTTGAAAGAGCCACCACATTTTCACCGAGGCCACGCGGAGTACGATCGAGTGTACAGTGAACAATGCTAGGGAGAGCTG
CCTATATGGAAGAGCCCTAATGTGTAAAATTAATTTTAGTAGTGCTATCCCCATGTGATTTTAATAGCTTCTTAGGAGNAT
GACANNNNNNNNNNNNNN
SEQ ID NO: 16
>Severe acute respiratory syndrome coronavirus 2 orf1ab polyprotein of isolate hCoV-
19/Austria/CeMM0360/2020
MESLVPGFNEKTHVQLSLPVLQVRDVLVRGFGDSVEEVLSEARQHLKDGTCGLVEVEKGVLPQLEQPYVFIKRSDARTAPHGH
VMVELVAELEGIQYGRSGETLGVLVPHVGEIPVAYRKVLLRKNGNKGAGGHSYGADLKSFDLGDELGTDPYEDFQENWNTKH
SSGVTRELMRELNGGAYTRYVDNNFCGPDGYPLECIKDLLARAGKASCTLSEQLDFIDTKRGVYCCREHEHEIAWYTERSEKSYE
LQTPFEIKLAKKFDTFNGECPNFVFPLNSIIKTIQPRVEKKKLDGFMGRIRSVYPVASPNECNQMCLSTLMKCDHCGETSWQTG
DFVKATCEFCGTENLTKEGATTCGYLPQNAVVKIYCPACHNSEVGPEHSLAEYHNESGLKTILRKGGRTIAFGGCVFSYVGCHNK
CAYWVPRASANIGCNHTGVVGEGSEGLNDNLLEILQKEKVNINIVGDFKLNEEIAIILASFSASTSAFVETVKGLDYKAFKQIVESC
GNFKVTKGKAKKGAWNIGEQKSILSPLYAFASEAARVVRSIFSRTLETAQNSVRVLQKAAITILDGISQYSLRLIDAMMFTSDLAT
NNLVVMAYITGGVVQLTSQWLTNIFGTVYEKLKPVLDWLEEKFKEGVEFLRDGWEIVKFISTCACEIVGGQIVTCAKEIKESVQT
FFKLVNKFLALCADSIIIGGAKLKALNLGETFVTHSKGLYRKCVKSREETGLLMPLKAPKEIIFLEGETLPTEVLTEEVVLKTGDLQPL
EQPTSEAVEAPLVGTPVCINGLMLLEIKDTEKYCALAPNMMVTNNTFTLKGGAPTKVTFGDDTVIEVQGYKSVNITFELDERIDK
VLNEKCSAYTVELGTEVNEFACVVADAVIKTLQPVSELLTPLGIDLDEWSMATYYLFDESGEFKLASHMYCSFYPPDEDEEEGDC
EEEEFEPSTQYEYGTEDDYQGKPLEFGATSAALQPEEEQEEDWLDDDSQQTVGQQDGSEDNQTTTIQTIVEVQPQLEMELTP
VVQTIEVNSFSGYLKLTDNVYIKNADIVEEAKKVKPTVVVNAANVYLKHGGGVAGALNKATNNAMQVESDDYIATNGPLKVG
GSCVLSGHNLAKHCLHVVGPNVNKGEDIQLLKSAYENFNQHEVLLAPLLSAGIFGADPIHSLRVCVDTVRTNVYLAVFDKNLYD
KLVSSFLEMKSEKQVEQKIAFIPKEEVKPFITESKPSVEQRKQDDKKIKACVEEVTTTLEETKFLTENLLLYIDINGNLHPDSATLVSD
IDITFLKKDAPYIVGDVVQEGVLTAVVIPTKKAGGTTEMLAKALRKVPTDNYITTYPGQGLNGYTVEEAKTVLKKCKSAFYILPSIIS
NEKQEILGTVSWNLREMLAHAEETRKLMPVCVETKAIVSTIQRKYKGIKIQEGVVDYGARFYFYTSKTTVASLINTLNDLNETLVT
MPLGYVTHGLNLEEAARYMRSLKVPATVSVSSPDAVTAYNGYLTSSSKTPEEHFIETISLAGSYKDWSYSGQSTQLGIEFLKRGD
KSVYYTSNPTTFHLDGEVITFDNLKTLLSLREVRTIKVFTTVDNINLHTQVVDMSMTYGQQFGPTYLDGADVTKIKPHNSHEGKT
FYVLPNDDTLRVEAFEYYHTTDPSFLGRYMSALNHTKKWKYPQVNGLTSIKWADNNCYLATALLTLQQIELKFNPPALQDAYYR
ARAGEAANFCALILAYCNKTVGELGDVRETMSYLFQHANLDSCKRVLNVVCKTCGQQQTTLKGVEAVMYMGTLSYEQFKKGV
QIPCTCGKQATKYLVQQESPFVMMSAPPAQYELKHGTFTCASEYTGNYQCGHYKHITSKETLYCIDGALLTKSSEYKGPITDVFY
KENSYTTTIKPVTYKLDGVVCTEIDPKLDNYYKKDNSYFTEQPIDLVPNQPYPNASFDNFKFVCDNIKFADDLNQLTGYKKPASRE
LKVTFFPDLNGDVVAIDYKHYTPSFKKGAKLLHKPIVWHVNNATNKATYKPNTWCIRCLWSTKPVETSNSFDVLKSEDAQGMD
NLACEDLKPVSEEVVENPTIQKDVLECNVKTTEVVGDIILKPANNSLKITEEVGHTDLMAAYVDNSSLTIKKPNELSRVLGLKTLAT
HGLAAVNSVPWDTIANYAKPFLNKVVSTTTNIVTRCLNRVCTNYMPYFFTLLLQLCTFTRSTNSRIKASMPTTIAKNTVKSVGKF
CLEASFNYLKSPNFSKLINIIIWFLLLSVCLGSLIYSTAALGVLMSNLGMPSYCTGYREGYLNSTNVTIATYCTGSIPCSVCLSGLDSL
DTYPSLETIQITISSFKWDLTAFGLVAEWFLAYILFTRFFYVLGLAAIMQLFFSYFAVHFISNSWLMWLIINLVQMAPISAMVRMY
IFFASFYYVWKSYVHVVDGCNSSTCMMCYKRNRATRVECTTIVNGVRRSFYVYANGGKGFCKLHNWNCVNCDTFCAGSTFIS
DEVARDLSLQFKRPINPTDQSSYIVDSVTVKNGSIHLYFDKAGQKTYERHSLSHFVNLDNLRANNTKGSLPINVIVFDGKSKCEES
SAKSASVYYSQLMCQPILLLDQALVSDVGDSAEVAVKMFDAYVNTFSSTFNVPMEKLKTLVATAEAELAKNVSLDNVLSTFISAA
RQGFVDSDVETKDVVECLKLSHQSDIEVTGDSCNNYMLTYNKVENMTPRDLGACIDCSARHINAQVAKSHNIALIWNVKDFM
SLSEQLRKQIRSAAKKNNLPFKLTCATTRQVVNVVTTKIALKGGKIVNNWLKQLIKVTLVFLFVAAIFYLITPVHVMSKHTDFSSEII
GYKAIDGGVTRDIASTDTCFANKHADFDTWFSQRGGSYTNDKACPLIAAVITREVGFVVPGLPGTILRTTNGDFLHFLPRVFSAV
GNICYTPSKLIEYTDFATSACVLAAECTIFKDASGKPVPYCYDTNVLEGSVAYESLRPDTRYVLMDGSIIQFPNTYLEGSVRVVTTF
DSEYCRHGTCERSEAGVCVSTSGRWVLNNDYYRSLPGVFCGVDAVNLLTNMFTPLIQPIGALDISASIVAGGIVAIVVTCLAYYF
MRFRRAFGEYSHVVAFNTLLFLMSFTVLCLTPVYSFLPGVYSVIYLYLTFYLTNDVSFLAHIQWMVMFTPLVPFWITIAYIICISTK
HFYWFFSNYLKRRVVFNGVSFSTFEEAALCTFLLNKEMYLKLRSDVLLPLTQYNRYLALYNKYKYFSGAMDTTSYREAACCHLAK
ALNDFSNSGSDVLYQPPQTSITSAVLQSGFRKMAFPSGKVEGCMVQVTCGTTTLNGLWLDDVVYCPRHVICTSEDMLNPNYE
DLLIRKSNHNFLVQAGNVQLRVIGHSMQNCVLKLKVDTANPKTPKYKFVRIQPGQTFSVLACYNGSPSGVYQCAMRPNFTIKG
SFLNGSCGSVGFNIDYDCVSFCYMHHMELPTGVHAGTDLEGNFYGPFVDRQTAQAAGTDTTITVNVLAWLYAAVINGDRWF
LNRFTTTLNDFNLVAMKYNYEPLTQDHVDILGPLSAQTGIAVLDMCASLKELLQNGMNGRTILGSALLEDEFTPFDVVRQCSGV
TFQSAVKRTIKGTHHWLLLTILTSLLVLVQSTQWSLFFFLYENAFLPFAMGHIAMSAFAMMFVKHKHAFLCLFLLPSLATVAYFN
MVYMPASWVMRIMTWLDMVDTSLSGFKLKDCVMYASAVVLLILMTARTVYDDGARRVWTLMNVLTLVYKVYYGNALDQA
ISMWALIISVTSNYSGVVTTVMFLARGIVFMCVEYCPIFFITGNTLQCIMLVYCFLGYFCTCYFGLFCLLNRYFRLTLGVYDYLVST
QEFRYMNSQGLLPPKNSIDAFKLNIKLLGVGGKPCIKVATVQSKMSDVKCTSVVLLSVLQQLRVESSSKLWAQCVQLHNDILLA
KDTTEAFEKMVSLLSVLLSMQGAVDINKLCEEMLDNRATLQAIASEFSSLPSYAAFATAQEAYEQAVANGDSEVVLKKLKKSLN
VAKSEFDRDAAMQRKLEKMADQAMTQMYKQARSEDKRAKVTSAMQTMLFTMLRKLQNDALNNIINNARDGCVPLNIIPLT
TAAKLMVVIPDYNTYKNTCDGTTFTYASALWEIQQVVDADSKIVQLSEISMDNSPNLAWPLIVTALRANSAVKLQNNELSPVAL
RQMSCAAGTTQTACTDDNALAYYNTTKGGRFVLALLSDLQDLKWARFPKSDGTGTIYTELEPPCRFVTDTPKGPKVKYLYFIKG
LNNLNRGMVLGSLAATVRLQAGNATEVPANSTVLSFCAFAVDAAKAYKDYLASGGQPITNCVKMLCTHTGTGQAITVTPEAN
MDQESFGGASCCLYCRCHIDHPNPKGFCDLKGKYVQIPTTCANDPVGFTLKNTVCTVCGMWKGYGCSCDQLREPMLQSADA
QSFLNGFAV
SEQ ID NO: 17
>SARS-CoV-2_S_MedUniWien (Sprotein_hCoV19AustriaCeMM03602020)
MFVFLVLLPLVSSQCVNLTTRTQLPPAYTNSFTRGVYYPDKVFRSSVLHSTQDLFLPFFSNVTWFHAIHVSGTNGTKRFDNPVLP
FNDGVYFASTEKSNIIRGWIFGTTLDSKTQSLLIVNNATNVVIKVCEFQFCNDPFLGVYYHKNNKSWMESEFRVYSSANNCTFEY
VSQPFLMDLEGKQGNFKNLREFVFKNIDGYFKIYSKHTPINLVRDLPQGFSALEPLVDLPIGINITRFQTLLALHRSYLTPGDSSSG
WTAGAAAYYVGYLQPRTFLLKYNENGTITDAVDCALDPLSETKCTLKSFTVEKGIYQTSNFRXQPTESIVRFPNITNLCPFGEVFN
ATRFASVYAWNRKRISNCVADYSVLYNSASFSTFKCYGVSPTKLNDLCFTNVYADSFVIRGDEVRQIAPGQTGKIADYNYKLPDD
FTGCVIAWNSNNLDSKVGGNYNYLYRLFRKSNLKPFERDISTEIYQAGSTPCNGVEGFNCYFPLQSYGFQPTNGVGYQPYRVVV
LSFELLHAPATVCGPKKSTNLVKNKCVNFNFNGLTGTGVLTESNKKFLPFQQFGRDIADTTDAVRDPQTLEILDITPCSFGGVSVI
TPGTNTSNQVAVLYQGVNCTEVPVAIHADQLTPTWRVYSTGSNVFQTRAGCLIGAEHVNNSYECDIPIGAGICASYQTQTNSP
RRARSVASQSIIAYTMSLGAENSVAYSXNSIAIPTNFTISVTTEILPVSMTKTSVDCTMYICGDSTECSNLLLQYGSFCTQLNRALT
GIAVEQDKNTQEVFAQVKQIYKTPPIKDFGGFNFSQILPDPSKPSKRSFIEDLLFNKVTLADAGFIKQYGDCLGDIAARDLICAQKF
NGLTVLPPLLTDEMIAQYTSALLAGTITSGWTFGAGAALQIPFAMQMAYRENGIGVTQNVLYENQKLIANQFNSAIGKIQDSLS
STASALGKLQDVVNQNAQALNTLVKQLSSNFGAISSVLNDILSRLDKVEAEVQIDRLITGRLQSLQTYVTQQLIRAAEIRVSANLA
ATKMSECVLGQSKRVDFCGKGYHLMSFPQSAPHGVVFLHVTYVPAQEKNFTTAPAICHDGKAHFPREGVFVSNGTHWFVTQ
RNFYEPQUITTDNTFVSGNCDVVIGIVNNTVYDPLQPELDSFKEELDKYFKNHTSPDVDLGDISGINASVVNIQKEIDRLNEVAKN
LNESLIDLQELGKYEQYIKWPWYIWLGFIAGLIAIVMVTIMLCCMTSCCSCLKGCCSCGSCCKFDEDDSEPVLKGVKLHYT
SEQ ID NO: 18
> Severe acute respiratory syndrome coronavirus 2 isolate SARS-CoV-2/human/England/ex-SA/2021,
EVAg Ref-SKU: 004V-04071 (SA_P2) complete genome. South-African B.1.351 lineage
ATTAAAGGTTTATACCTTCCCAGGTAACAAACCAACCAACTTTCGATCTCTTGTAGATCTGTTCTCTAAACGAACTTTAAAAT
CTGTGTGGCTGTCACTCGGCTGCATGCTTAGTGCACTCACGCAGTATAATTAATAACTAATTACTGTCGTTGACAGGACAC
GAGTAACTCTTCTATCTTCTGCAGGCTGCTTACGGTTTCGTCCGTGTTGCAGCCGATCATCAGCACATCTAGGTTTTGTCCG
GGTGTGACCGAAAGGTAAGATGGAGAGCCTTGTCCCTGGTTTCAACGAGAAAACACACGTCCAACTCAGTTTGCCTGTTTT
ACAGGTTCGCGACGTGCTCGTACGTGGCTTTGGAGACTCCGTGGAGGAGGTCTTATCAGAGGCACGTCAACATCTTAAAG
ATGGCACTTGTGGCTTAGTAGAAGTTGAAAAAGGCGTTTTGCCTCAACTTGAACAGCCCTATGTGTTCATCAAACGTTCGG
ATGCTCGAACTGCACCTCATGGTCATGTTATGGTTGAGCTGGTAGCAGAACTCGAAGGCATTCAGTACGGTCGTAGTGGT
GAGACACTTGGTGTCCTTGTCCCTCATGTGGGCGAAATACCAGTGGCTTACCGCAAGGTTCTTCTTCGTAAGAACGGTAAT
AAAGGAGCTGGTGGCCATAGTTACGGCGCCGATCTAAAGTCATTTGACTTAGGCGACGAGCTTGGCACTGATCCTTATGA
AGATTTTCAAGAAAACTGGAACACTAAACATAGCAGTGGTGTTACCCGTGAACTCATGCGTGAGCTTAACGGAGGGGCAT
ACACTCGCTATGTCGATAACAACTTCTGTGGCCCTGATGGCTACCCTCTTGAGTGCATTAAAGACCTTCTAGCACGTGCTGG
TAAAGCTTCATGCACTTTGTCCGAACAACTGGACTTTATTGACACTAAGAGGGGTGTATACTGCTGCCGTGAACATGAGCA
TGAAATTGCTTGGTACACGGAACGTTCTGAAAAGAGCTATGAATTGCAGACACCTTTTGAAATTAAATTGGCAAAGAAATT
TGACATCTTCAATGGGGAATGTCCAAATTTTGTATTTCCCTTAAATTCCATAATCAAGACTATTCAACCAAGGGTTGAAAAG
AAAAAGCTTGATGGCTTTATGGGTAGAATTCGATCTGTCTATCCAGTTGCGTCACCAAATGAATGCAACCAAATGTGCCTTT
CAACTCTCATGAAGTGTGATCATTGTGGTGAAACTTCATGGCAGACGGGCGATTTTGTTAAAGCCACTTGCGAATTTTGTG
GCACTGAGAATTTGACTAAAGAAGGTGCCACTACTTGTGGTTACTTACCCCAAAATGCTGTTGTTAAAATTTATTGTCCAGC
ATGTCACAATTCAGAAGTAGGACCTGAGCATAGTCTTGCCGAATACCATAATGAATCTGGCTTGAAAACCATTCTTCGTAA
GGGTGGTCGCACTATTGCCTTTGGAGGCTGTGTGTTCTCTTATGTTGGTTGCCATAACAAGTGTGCCTATTGGGTTCCACGT
GCTAGCGCTAACATAGGTTGTAACCATACAGGTGTTGTTGGAGAAGGTTCCGAAGGTCTTAATGACAACCTTCTTGAAATA
CTCCAAAAAGAGAAAGTCAACATCAATATTGTTGGTGACTTTAAACTTAATGAAGAGATCGCCATTATTTTGGCATCTTTTT
CTGCTTCCACAAGTGCTTTTGTGGAAACTGTGAAAGGTTTGGATTATAAAGCATTCAAACAAATTGTTGAATCCTGTGGTA
ATTTTAAAGTTACAAAAGGAAAAGCTAAAAAAGGTGCCTGGAATATTGGTGAACAGAAATCAATACTGAGTCCTCTTTATG
CATTTGCATCAGAGGCTGCTCGTGTTGTACGATCAATTTTCTCCCGCACTCTTGAAACTGCTCAAAATTCTGTGCGTGTTTTA
CAGAAGGCCGCTATAACAATACTAGATGGAATTTCACAGTATTCACTGAGACTCATTGATGCTATGATGTTCACATCTGATT
TGGCTACTAACAATCTAGTTGTAATGGCCTACATTACAGGTGGTGTTGTTCAGTTGACTTCGCAGTGGCTAACTAACATCTT
TGGCACTGTTTATGAAAAACTCAAACCCGTCCTTGATTGGCTTGAAGAGAAGTTTAAGGAAGGTGTAGAGTTTCTTAGAGA
CGGTTGGGAAATTGTTAAATTTATCTCAACCTGTGCTTGTGAAATTGTCGGTGGACAAATTGTCACCTGTGCAAAGGAAAT
TAAGGAGAGTGTTCAGACATTCTTTAAGCTTGTAAATAAATTTTTGGCTTTGTGTGCTGACTCTATCATTATTGGTGGAGCT
AAACTTAAAGCCTTGAATTTAGGTGAAACATTTGTCACGCACTCAAAGGGATTGTACAGAAAGTGTGTTAAATCCAGAGAA
GAAACTGGCCTACTCATGCCTCTAAAAGCCCCAAAAGAAATTATCTTCTTAGAGGGAGAAACACTTCCCACAGAAGTGTTA
ACAGAGGAAGTTGTCTTGAAAACTGGTGATTTACAACCATTAGAACAACCTACTAGTGAAGCTGTTGAAGCTCCATTGGTT
GGTACACCAGTTTGTATTAACGGGCTTATGTTGCTCGAAATCAAAGACACAGAAAAGTACTGTGCCCTTGCACCTAATATG
ATGGTAACTAACAATACCTTCACACTCAAAGGCGGTGCACCAACAAAGGTTACTTTTGGTGATGACACTGTGATAGAAGTG
CAAGGTTACAAGAGTGTGAATATCACTTTTGAACTTGATGAAAGGATTGATAAAGTACTTAATGAGAAGTGCTCTGCCTAT
ACAGTTGAACTCGGTACAGAAGTAAATGAGTTCGCCTGTGTTGTGGCAGATGCTGTCATAAAAACTTTGCAACCAGTATCT
GAATTACTTACACCACTGGGCATTGATTTAGATGAGTGGAGTATGGCTACATACTACTTATTTGATGAGTCTGGTGAGTTTA
AATTGGCTTCACATATGTATTGTTCTTTTTACCCTCCAGATGAGGATGAAGAAGAAGGTGATTGTGAAGAAGAAGAGTTTG
AGCCATCAACTCAATATGAGTATGGTACTGAAGATGATTACCAAGGTAAACCTTTGGAATTTGGTGCCACTTCTGCTGCTCT
TCAACCTGAAGAAGAGCAAGAAGAAGATTGGTTAGATGATGATAGTCAACAAACTGTTGGTCAACAAGACGGCAGTGAG
GACAATCAGACAACTACTATTCAAACAATTGTTGAGGTTCAACCTCAATTAGAGATGGAACTTACACCAGTTGTTCAGACTA
TTGAAGTGAATAGTTTTAGTGGTTATTTAAAACTTACTGACAATGTATACATTAAAAATGCAGACATTGTGGAAGAAGCTA
AAAAGGTAAAACCAACAGTGGTTGTTAATGCAGCCAATGTTTACCTTAAACATGGAGGAGGTGTTGCAGGAGCCTTAAAT
AAGGCTACTAACAATGCCATGCAAGTTGAATCTGATGATTACATAGCTACTAATGGACCACTTAAAGTGGGTGGTAGTTGT
GTTTTAAGCGGACACAATCTTGCTAAACACTGTCTTCATGTTGTCGGCCCAAATGTTAACAAAGGTGAAGACATTCAACTTC
TTAAGAGTGCTTATGAAAATTTTAATCAGCACGAAGTTCTACTTGCACCATTATTATCAGCTGGTATTTTTGGTGCTGACCCT
ATACATTCTTTAAGAGTTTGTGTAGATACTGTTCGCACAAATGTCTACTTAGCTGTCTTTGATAAAAATCTCTATGACAAACT
TGTTTCAAGCTTTTTGGAAATGAAGAGTGAAAAGCAAGTTGAACAAAAGATCGCTGAGATTCCTAAAGAGGAAGTTAAGC
CATTTATAACTGAAAGTAAACCTTCAGTTGAACAGAGAAAACAAGATGATAAGAAAATCAAAGCTTGTGTTGAAGAAGTT
ACAACAACTCTGGAAGAAACTAAGTTCCTCACAGAAAACTTGTTACTTTATATTGACATTAATGGCAATCTTCATCCAGATT
CTGCCACTCTTGTTAGTGACATTGACATCACTTTCTTAAAGAAAGATGCTCCATATATAGTGGGTGATGTTGTTCAAGAGGG
TGTTTTAACTGCTGTGGTTATACCTACTAAAAAGGCTGGTGGCACTACTGAAATGTTAGCGAAAGCTTTGAGAAAAGTGCC
AACAGACAATTATATAACCACTTACCCGGGTCAGGGTTTAAATGGTTACACTGTAGAGGAGGCAAAGACAGTGCTTAAAA
AGTGTAAAAGTGCCTTTTACATTCTACCATCTATTATCTCTAATGAGAAGCAAGAAATTCTTGGAACTGTTTCTTGGAATTTG
CGAGAAATGCTTGCACATGCAGAAGAAACACGCAAATTAATGCCTGTCTGTGTGGAAACTAAAGCCATAGTTTCAACTATA
CAGCGTAAATATAAGGGTATTAAAATACAAGAGGGTGTGGTTGATTATGGTGCTAGATTTTACTTTTACACCAGTAAAACA
ACTGTAGCGTCACTTATCAACACACTTAACGATCTAAATGAAACTCTTGTTACAATGCCACTTGGCTATGTAACACATGGCT
TAAATTTGGAAGAAGCTGCTCGGTATATGAGATCTCTCAAAGTGCCAGCTACAGTTTCTGTTTCTTCACCTGATGCTGTTAC
AGCGTATAATGGTTATCTTACTTCTTCTTCTAAAACACCTGAAGAACATTTTATTGAAACCATCTCACTTGCTGGTTCCTATA
AAGATTGGTCCTATTCTGGACAATCTACACAACTAGGTATAGAATTTCTTAAGAGAGGTGATAAAAGTGTATATTACACTA
GTAATCCTACCACATTCCACCTAGATGGTGAAGTTATCACCTTTGACAATCTTAAGACACTTCTTTCTTTGAGAGAAGTGAG
GACTATTAAGGTGTTTACAACAGTAGACAACATTAACCTCCACACGCAAGTTGTGGACATGTCAATGACATATGGACAACA
GTTTGGTCCAACTTATTTGGATGGAGCTGATGTTACTAAAATAAAACCTCATAATTCACATGAAGGTAAAACATTTTATGTT
TTACCTAATGATGACACTCTACGTGTTGAGGCTTTTGAGTACTACCACACAACTGATCCTAGTTTTCTGGGTAGGTACATGT
CAGCATTAAATCACACTAAAAATTGGAAATACCCACAAGTTAATGGTTTAACTTCTATTAAATGGGCAGATAACAACTGTTA
TCTTGCCACTGCATTGTTAACACTCCAACAAATAGAGTTGAAGTTTAATCCACCTGCTCTACAAGATGCTTATTACAGAGCA
AGGGCTGGTGAAGCTGCTAACTTTTGTGCACTTATCTTAGCCTACTGTAATAAGACAGTAGGTGAGTTAGGTGATGTTAGA
GAAACAATGAGTTACTTGTTTCAACATGCCAATTTAGATTCTTGCAAAAGAGTCTTGAACGTGGTGTGTAAAACTTGTGGA
CAACAGCAGACAACCCTTAAGGGTGTAGAAGCTGTTATGTACATGGGCACACTTTCTTATGAACAATTTAAGAAAGGTGTT
CAGATACCTTGTACGTGTGGTAAACAAGCTACAAAATATCTAGTACAACAGGAGTCACCTTTTGTTATGATGTCAGCACCA
CCTGCTCAGTATGAACTTAAGCATGGTACATTTACTTGTGCTAGTGAGTACACTGGTAATTACCAGTGTGGTCACTATAAAC
ATATAACTTCTAAAGAAACTTTGTATTGCATAGACGGTGCTTTACTTACAAAGTCCTCAGAATACAAAGGTCCTATTACGGA
TGTTTTCTACAAAGAAAACAGTTACACAACAACCATAAAACCAGTTACTTATAAATTGGATGGTGTTGTTTGTACAGAAATT
GACCCTAAGTTGGACAATTATTATAAGAAAGACAATTCTTATTTCACAGAGCAACCAATTGATCTTGTACCAAACCAACCAT
ATCCAAACGCAAGCTTCGATAATTTTAAGTTTGTATGTGATAATATCAAATTTGCTGATGATTTAAACCAGTTAACTGGTTA
CAAGAAACCTGCTTCAAGAGAGCTTAAAGTTACATTTTTCCCTGACTTAAATGGTGATGTGGTGGCTATTGATTATAAACAC
TACACACCCTCTTTTAAGAAAGGAGCTAAATTGTTACATAAACCTATTGTTTGGCATGTTAACAATGCAACTAATAAAGCCA
CGTATAAACCAAATACCTGGTGTATACGTTGTCTTTGGAGCACAAAACCAGTTGAAACATCAAATTCGTTTGATGTACTGAA
GTCAGAGGACGCGCAGGGAATGGATAATCTTGCCTGCGAAGATCTAAAACCAGTCTCTGAAGAAGTAGTGGAAAATCCTA
CCATACAGAAAGACGTTCTTGAGTGTAATGTGAAAACTACCGAAGTTGTAGGAGACATTATACTTAAACCAGCAAATAATA
GTTTAAAAATTACAGAAGAGGTTGGCCACACAGATCTAATGGCTGCTTATGTAGACAATTCTAGTCTTACTATTAAGAAAC
CTAATGAATTATCTAGAGTATTAGGTTTGAAAACCCTTGCTACTCATGGTTTAGCTGCTGTTAATAGTGTCCCTTGGGATAC
TATAGCTAATTATGCTAAGCCTTTTCTTAACAAAGTTGTTAGTACAACTACTAACATAGTTACACGGTGTTTAAACCGTGTTT
GTACTAATTATATGCCTTATTTCTTTACTTTATTGCTACAATTGTGTACTTTTACTAGAAGTACAAATTCTAGAATTAAAGCAT
CTATGCCGACTACTATAGCAAAGAATACTGTTAAGAGTGTCGGTAAATTTTGTCTAGAGGCTTCATTTAATTATTTGAAGTC
ACCTAATTTTTCTAAACTGATAAATATTATAATTTGGTTTTTACTATTAAGTGTTTGCCTAGGTTCTTTAATMTACTCAACCG
CTGCTTTAGGTGTTTTAATGTCTAATTTAGGCATGCCTTCTTACTGTACTGGTTACAGAGAAGGCTATTTGAACTCTACTAAT
GTCACTATTGCAACCTACTGTACTGGTTCTATACCTTGTAGTGTTTGTCTTAGTGGTTTAGATTCTTTAGACACCTATCCTTCT
TTAGAAACTATACAAATTACCATTTCATCTTTTAAATGGGATTTAACTGCTTTTGGCTTAGTTGCAGAGTGGTTTTTGGCATA
TATTCTTTTCACTAGGTTTTTCTATGTACTTGGATTGGCTGCAATCATGCAATTGTTTTTCAGCTATTTTGCAGTACATTTTAT
TAGTAATTCTTGGCTTATGTGGTTAATAATTAATCTTGTACAAATGGCCCCGATTTCAGCTATGGTTAGAATGTACATCTTCT
TTGCATCATTTTATTATGTATGGAAAAGTTATGTGCATGTTGTAGACGGTTGTAATTCATCAACTTGTATGATGTGTTACAA
ACGTAATAGAGCAACAAGAGTCGAATGTACAACTATTGTTAATGGTGTTAGAAGGTCCTTTTATGTCTATGCTAATGGAGG
TAAAGGCTTTTGCAAACTACACAATTGGAATTGTGTTAATTGTGATACATTCTGTGCTGGTAGTACATTTATTAGTGATGAA
GTTGCGAGAGACTTGTCACTACAGTTTAAAAGACCAATAAATCCTACTGACCAGTCTTCTTACATCGTTGATAGTGTTACAG
TGAAGAATGGTTCCATCCATCTTTACTTTGATAAAGCTGGTCAAAAGACTTATGAAAGACATTCTCTCTCTCATTTTGTTAAC
TTAGACAACCTGAGAGCTAATAACACTAAAGGTTCATTGCCTATTAATGTTATAGTTTTTGATGGTAAATCAAAATGTGAAG
AATCATCTGCAAAATCAGCGTCTGTTTACTACAGTCAGCTTATGTGTCAACCTATACTGTTACTAGATCAGGCATTAGTGTC
TGATGTTGGTGATAGTGCGGAAGTTGCAGTTAAAATGTTTGATGCTTACGTTAATACGTTTTCATCAACTTTTAACGTACCA
ATGGAAAAACTCAAAACACTAGTTGCAACTGCAGAAGCTGAACTTGCAAAGAATGTGTCCTTAGACAATGTCTTATCTACT
TTTATTTCAGCAGCTCGGCAAGGGTTTGTTGATTCAGATGTAGAAACTAAAGATGTTGTTGAATGTCTTAAATTGTCACATC
AATCTGACATAGAAGTTACTGGCGATAGTTGTAATAACTATATGCTCACCTATAACAAAGTTGAAAACATGACACCCCGTG
ACCTTGGTGCTTGTATTGACTGTAGTGCGCGTCATATTAATGCGCAGGTAGCAAAAAGTCACAACATTGCTTTGATATGGA
ACGTTAAAGATTTCATGTCATTGTCTGAACAACTACGAAAACAAATACGTAGTGCTGCTAAAAAGAATAACTTACCTTTTAA
GTTGACATGTGCAACTACTAGACAAGTTGTTAATGTTGTAACAACAAAGATAGCACTTAAGGGTGGTAAAATTGTTAATAA
TTGGTTGAAGCAGTTAATTAAAGTTACACTTGTGTTCCTTTTTGTTGCTGCTATTTTCTATTTAATAACACCTGTTCATGTCAT
GTCTAAACATACTGACTTTTCAAGTGAAATCATAGGATACAAGGCTATTGATGGTGGTGTCACTCGTGACATAGCATCTAC
AGATACTTGTTTTGCTAACAAACATGCTGATTTTGACACATGGTTTAGCCAGCGTGGTGGTAGTTATACTAATGACAAAGCT
TGCCCATTGATTGCTGCAGTCATAACAAGAGAAGTGGGTTTTGTCGTGCCTGGTTTGCCTGGCACGATATTACGCACAACT
AATGGTGACTTTTTGCATTTCTTACCTAGAGTTTTTAGTGCAGTTGGTAACATCTGTTACACACCATCAAAACTTATAGAGTA
CACTGACTTTGCAACATCAGCTTGTGTTTTGGCTGCTGAATGTACAATTTTTAAAGATGCTTCTGGTAAGCCAGTACCATAT
TGTTATGATACCAATGTACTAGAAGGTTCTGTTGCTTATGAAAGTTTACGCCCTGACACACGTTATGTGCTCATGGATGGCT
CTATTATTCAATTTCCTAACACCTACCTTGAAGGTTCTGTTAGAGTGGTAACAACTTTTGATTCTGAGTACTGTAGGCACGG
CACTTGTGAAAGATCAGAAGCTGGTGTTTGTGTATCTACTAGTGGTAGATGGGTACTTAACAATGATTATTACAGATCTTTA
CCAGGAGTTTTCTGTGGTGTAGATGCTGTAAATTTATTTACTAATATGTTTACACCACTAATTCAACCTATTGGTGCTTTGGA
CATATCAGCATCTATAGTAGCTGGTGGTATTGTAGCTATCGTAGTAACATGCCTTGCCTACTATTTTATGAGGTTTAGAAGA
GCTTTTGGTGAATACAGTCATGTAGTTGCCTTTAATACTTTACTATTCCTTATGTCATTCACTGTACTCTGTTTAACACCAGTT
TACTCATTCTTACCTGGTGTTTATTCTGTTATTTACTTGTACTTGACATTTTATCTTACTAATGATGTTTCTTTTTTAGCACATA
TTCAGTGGATGGTTATGTTCACACCTTTAGTACCTTTCTGGATAACAATTGCTTATATCATTTGTATTTCCACAAAGCATTTCT
ATTGGTTCTTTAGTAATTACCTAAAGAGACGTGTAGTCTTTAATGGTGTTTCCTTTAGTACTTTTGAAGAAGCTGCGCTGTG
CACCTTTTTGTTAAATAAAGAAATGTATCTAAAGTTGCGTAGTGATGTGCTATTACCTCTTACGCAATATAATAGATACTTA
GCTCTTTATAATAAGTACAAGTATTTTAGTGGAGCAATGGATACAACTAGCTACAGAGAAGCTGCTTGTTGTCATCTCGCA
AAGGCTCTCAATGACTTCAGTAACTCAGGTTCTGATGTTCTTTACCAACCACCACAAACCTCTATCACCTCAGCTGTTTTGCA
GAGTGGTTTTAGAAAAATGGCATTCCCATCTGGTAAAGTTGAGGGTTGTATGGTACAAGTAACTTGTGGTACAACTACACT
TAACGGTCTTTGGCTTGATGACGTAGTTTACTGTCCAAGACATGTGATCTGCACCTCTGAAGACATGCTTAACCCTAATTAT
GAAGATTTACTCATTCGTAAGTCTAATCATAATTTCTTGGTACAGGCTGGTAATGTTCAACTCAGGGTTATTGGACATTCTA
TGCAAAATTGTGTACTTAAGCTTAGGGTTGATACAGCCAATCCTAAGACACCTAAGTATAAGTTTGTTCGCATTCAACCAG
GACAGACTTTTTCAGTGTTAGCTTGTTACAATGGTTCACCATCTGGTGTTTACCAATGTGCTATGAGGCCCAATTTCACTATT
AAGGGTTCATTCCTTAATGGTTCATGTGGTAGTGTTGGTTTTAACATAGATTATGACTGTGTCTCTTTTTKTTACATGCACCA
TATGGAATTACCAACTGGAGTTCATGCTGGCACAGACTTAGAAGGTAACTTTTATGGACCTTTTGTTGACAGGCAAACAGC
ACAAGCAGCTGGTACGGACACAACTATTACAGTTAATGTTTTAGCTTGGTTGTACGCTGCTGTTATAAATGGAGACAGGTG
GTTTCTCAATCGATTTACCACAACTCTTAATGACTTTAACCTTGTGGCTATGAAGTACAATTATGAACYTCTAACACAAGACC
ATGTTGACATACTAGGACCTCTTTCTGCTCAAACTGGAATTGCCGTTTTAGATATGTGTGCTTCATTAAAAGAATTACTGCA
AAATGGTATGAATGGACGTACCATATTGGGTAGTGCTTTATTAGAAGATGAATTTACACCTTTTGATGTTGTTAGACAATG
CTCAGGTGTTACTTTCCAAAGTGCAGTGAAAAGAACAATCAAGGGTACACACCACTGGTTGTTACTCACAATTTTGACTTCA
CTTTTAGTTTTAGTCCAGAGTACTCAATGGTCTTTGTTCTTTTTTTTGTATGAAAATGCCTTTTTACCTTTTGCTATGGGTATT
ATTGCTATGTCTGCTTTTGCAATGATGTTTGTCAAACATAAGCATGCATTTCTCTGTTTGTTTTTGTTACCTTCTCTTGCCACT
GTAGCTTATTTTAATATGGTCTATATGCCTGCTAGTTGGGTGATGCGTATTATGACATGGTTGGATATGGTTGATACTAGTT
TGNNNNNNAAGCTAAAAGACTGTGTTATGTATGCATCAGCTGTAGTGTTACTAATCCTTATGACAGCAAGAACTGTGTAT
GATGATGGTGCTAGGAGAGTGTGGACACTTATGAATGTCTTGACACTCGTTTATAAAGTTTATTATGGTAATGCTTTAGAT
CAAGCCATTTCCATGTGGGCTCTTATAATCTCTGTTACTTCTAACTACTCAGGTGTAGTTACAACTGTCATGTTTTTGGCCAG
AGGTATTGTTTTTATGTGTGTTGAGTATTGCCCTATTTTCTTCATAACTGGTAATACACTTCAGTGTATAATGCTAGTTTATT
GTTTCTTAGGCTATTTTTGTACTTGTTACTTTGGCCTCTTTTGTTTACTCAACCGCTACTTTAGACTGACTCTTGGTGTTTATG
ATTACTTAGTTTCTACACAGGAGTTTAGATATATGAATTCACAGGGACTAYTCCCACCCAAGAATAGCATAGATGCCTTCAA
ACTCAACATTAAATTGTTGGGTGTTGGTGGCAAACCTTGTATCAAAGTAGCCACTGTACAGTCTAAAATGTCAGATGTAAA
GTGCACATCAGTAGTCTTACTCTCAGTTTTGCAACAACTCAGAGTAGAATCATCATCTAAATTGTGGGCTCAATGTGTCCAG
TTACACAATGACATTCTCTTAGCTAAAGATACTACTGAAGCCTTTGAAAAAATGGTTTCACTACTTTCTGTTTTGCTTTCCAT
GCAGGGTGCTGTAGACATAAACAAGCTTTGTGAAGAAATGCTGGACAACAGGGCAACCTTACAAGCTATAGCCTCAGAGT
TTAGTTCCCTTCCATCATATGCAGCTTTTGCTACTGCTCAAGAAGCTTATGAGCAGGCTGTTGCTAATGGTGATTCTGAAGT
TGTTCTTAAAAAGTTGAAGAAGTCTTTGAATGTGGCTAAATCTGAATTTGACCGTGATGCAGCCATGCAACGTAAGTTGGA
AAAGATGGCTGATCAAGCTATGACCCAAATGTATAAACAGGCTAGATCTGAGGACAAGAGGGCAAAAGTTACTAGTGCTA
TGCAGACAATGCTTTTCACTATGCTTAGAAAGTTGGATAATGATGCACTCAACAACATTATCAACAATGCAAGAGATGGTT
GTGTTCCCTTGAACATAATACCTCTTACAACAGCAGCCAAACTAATGGTTGTCATACCAGACTATAACACATATAAAAATAC
GTGTGATGGTACAACATTTACTTATGCATCAGCATTGTGGGAAATCCAACAGGTTGTAGATGCAGATAGTAAAATTGTTCA
ACTTAGTGAAATTAGTATGGACAATTCACCTAATTTAGCATGGCCTCTTATTGTAACAGCTTTAAGGGCCAATTCTGCTGTC
AAATTACAGAATAATGAGCTTAGTCCTGTTGCACTACGACAGATGTCTTGTGCTGCCGGTACTACACAAACTGCTTGCACT
GATGACAATGCGTTAGCTTACTACAACACAACAAAGGGAGGTAGGTTTGTACTTGCACTGTTATCCGATTTACAGGATTTG
AAATGGGCTAGATTCCCTAAGAGTGATGGAACTGGTACTATCTATACAGAACTGGAACCACCTTGTAGGTTTGTTACAGAC
ACACCTAAAGGTCCTAAAGTGAAGTATTTATACTTTATTAAAGGATTAAACAACCTAAATAGAGGTATGGTACTTGGTAGT
TTAGCTGCCACAGTACGTCTACAAGCTGGTAATGCAACAGAAGTGCCTGCCAATTCAACTGTATTATCTTTCTGTGCTTTTG
CTGTAGATGCTGCTAAAGCTTACAAAGATTATCTAGCTAGTGGGGGACAACCAATCACTAATTGTGTTAAGATGTTGTGTA
CACACACTGGTACTGGTCAGGCAATAACAGTTACACCGGAAGCCAATATGGATCAAGAATCCTTTGGTGGTGCATCGTGTT
GTCTGTACTGCCGTTGCCACATAGATCATCCAAATCCTAAAGGATTTTGTGACTTAAAAGGTAAGTATGTACAAATACCTAC
AACTTGTGCTAATGACCCTGTGGGTTTTACACTTAAAAACACAGTCTGTACCGTCTGCGGTATGTGGAAAGGTTATGGCTG
TAGTTGTGATCAACTCCGCGAACCCATGCTTCAGTCAGCTGATGCACAATCGTTTTTAAACGGGTTTGCGGTGTAAGTGCA
GCCCGTCTTACACCGTGCGGCACAGGCACTAGTACTGATGTCGTATACAGGGCTTTTGACATCTACAATGATAAAGTAGCT
GGTTTTGCTAAATTCCTAAAAACTAATTGTTGTCGCTTCCAAGAAAAGGACGAAGATGACAATTTAATTGATTCTTACTTTG
TAGTTAAGAGACACACTTTCTCTAACTACCAACATGAAGAAACAATTTATAATTTACTTAAGGATTGTCCAGCTGTTGCTAA
ACATGACTTCTTTAAGTTTAGAATAGACGGTGACATGGTACCACATATATCACGTCAACGTCTTACTAAATACACAATGGCA
GACCTCGTCTATGCTTTAAGGCATTTTGATGAAGGTAATTGTGACACATTAAAAGAAATACTTGTCACATACAATTGTTGTG
ATGATGATTATTTCAATAAAAAGGACTGGTATGATTTTGTAGAAAACCCAGATATATTACGCGTATACGCCAACTTAGGTG
AACGTGTACGCCAAGCTTTGTTAAAAACAGTACAATTCTGTGATGCCATGCGAAATGCTGGTATTGTTGGTGTACTGACAT
TAGATAATCAAGATCTCAATGGTAACTGGTATGATTTCGGTGATTTCATACAAACCACGCCAGGTAGTGGAGTTCCTGTTG
TAGATTCTTATTATTCATTGTTAATGCCTATATTAACCTTGACCAGGGCTTTAACTGCAGAGTCACATGTTGACACTGACTTA
ACAAAGCCTTACATTAAGTGGGATTTGTTAAAATATGACTTCACGGAAGAGAGGTTAAAACTCTTTGACCGTTATTTTAAAT
ATTGGGATCAGACATACCACCCAAATTGTGTTAACTGTTTGGATGACAGATGCATTCTGCATTGTGCAAACTTTAATGTTTT
ATTCTCTACAGTGTTCCCACTTACAAGTTTTGGACCACTAGTGAGAAAAATATTTGTTGATGGTGTTCCATTTGTAGTTTCAA
CTGGATACCACTTCAGAGAGCTAGGTGTTGTACATAATCAGGATGTAAACTTACATAGCTCTAGACTTAGTTTTAAGGAAT
TACTTGTGTATGCTGCTGACCCTGCTATGCACGCTGCTTCTGGTAATCTATTACTAGATAAACGCACTACGTGCTTTTCAGT
AGCTGCACTTACTAACAATGTTGCTTTTCAAACTGTCAAACCCGGTAATTTTAACAAAGACTTCTATGACTTTGCTGTGTCTA
AGGGTTTCTTTAAGGAAGGAAGTTCTGTTGAATTAAAACACTTCTTCTTTGCTCAGGATGGTAATGCTGCTATCAGCGATTA
TGACTACTATCGTTATAATCTACCAACAATGTGTGATATCAGACAACTACTATTTGTAGTTGAAGTTGTTGATAAGTACTTT
GATTGTTACGATGGTGGCTGTATTAATGCTAACCAAGTCATCGTCAACAACCTAGACAAATCAGCTGGTTTTCCATTTAATA
AATGGGGTAAGGCTAGACTTTATTATGATTCAATGAGTTATGAGGATCAAGATGCACTTTTCGCATATACAAAACGTAATG
TCATCCCTACTATAACTCAAATGAATCTTAAGTATGCCATTAGTGCAAAGAATAGAGCTCGCACCGTAGCTGGTGTCTCTAT
CTGTAGTACTATGACCAATAGACAGTTTCATCAAAAATTATTGAAATCAATAGCCGCCACTAGAGGAGCTACTGTAGTAAT
TGGAACAAGCAAATTCTATGGTGGTTGGCACAACATGTTAAAAACTGTTTATAGTGATGTAGAAAACCCTCACCTTATGGG
TTGGGATTATCCTAAATGTGATAGAGCCATGCCTAACATGCTTAGAATTATGGCCTCACTTGTTCTTGCTCGCAAACATACA
ACGTGTTGTAGCTTGTCACACCGTTTCTATAGATTAGCTAATGAGTGTGCTCAAGTATTGAGTGAAATGGTCATGTGTGGC
GGTTCACTATATGTTAAACCAGGTGGAACCTCATCAGGAGATGCCACAACTGCTTATGCTAATAGTGTTTTTAACATTTGTC
AAGCTGTCACGGCCAATGTTAATGCACTTTTATCTACTGATGGTAACAAAATTGCCGATAAGTATGTCCGCAATTTACAAC
ACAGACTTTATGAGTGTCTCTATAGAAATAGAGATGTTGACACAGACTTTGTGAATGAGTTTTACGCATATTTGCGTAAAC
ATTTCTCAATGATGATACTCTCTGACGATGCTGTTGTGTGTTTCAATAGCACTTATGCATCTCAAGGTCTAGTGGCTAGCAT
AAAGAACTTTAAGTCAGTTCTTTATTATCAAAACAATGTTTTTATGTCTGAAGCAAAATGTTGGACTGAGACTGACCTTACT
AAAGGACCTCATGAATTTTGCTCTCAACATACAATGCTAGTTAAACAGGGTGATGATTATGTGTACCTTCCTTACCCAGATC
CATCAAGAATCCTAGGGGCCGGCTGTTTTGTAGATGATATCGTAAAAACAGATGGTACACTTATGATTGAACGGTTCGTGT
CTTTAGCTATAGATGCTTACCCACTTACTAAACATCCTAATCAGGAGTATGCTGATGTCTTTCATTTGTACTTACAATACATA
AGAAAGCTACATGATGAGTTAACAGGACACATGTTAGACATGTATTCTGTTATGCTTACTAATGATAACACTTCAAGGTATT
GGGAACCTGAGTTTTATGAGGCTATGTACACACCGCATACAGTCTTACAGGCTGTTGGGGCTTGTGTTCTTTGCAATTCAC
AGACTTCATTAAGATGTGGTGCTTGCATACGTAGACCATTCTTATGTTGTAAATGCTGTTACGACCATGTCATATCAACATC
ACATAAATTAGTCTTGTCTGTTAATCCGTATGTTTGCAATGCTTCAGGTTGTGATGTCACAGATGTGACTCAACTTTACTTAG
GAGGTATGAGCTATTATTGTAAATCACATAAACCACCCATTAGTTTTCCATTGTGTGCTAATGGACAAGTTTTTGGTTTATAT
AAAAATACATGTGTTGGTAGCGATAATGTTACTGACTTTAATGCAATTGCAACATGTGACTGGACAAATGCTGGTGATTAC
ATTTTAGCTAACACCTGTACTGAAAGACTCAAGCTTTTTGCAGCAGAAACGCTCAAAGCTACTGAGGAGACATTTAAACTG
TCTTATGGTATTGCTACTGTACGTGAAGTGCTGTCTGACAGAGAATTACATCTTTCATGGGAAGTTGGTAAACCTAGACCA
CCACTTAACCGAAATTATGTCTTTACTGGTTATCGTGTAACTAAAAACAGTAAAGTACAAATAGGAGAGTACACCTTTGAA
AAAGGTGACTATGGTGATGCTGTTGTTTACCGAGGTACAACAACTTACAAATTAAATGTTGGTGATTATTTTGTGCTGACAT
CACATACAGTAATGCCATTAAGTGCACCTACACTAGTGCCACAAGAGCACTATGTTAGAATTACTGGCTTATACCCAACACT
CAATATCTCAGATGAGTTTTCTAGCAATGTTGCAAATTATCAAAAGGTTGGTATGCAAAAGTATTCTACACTCCAGGGACCA
CCTGGTACTGGTAAGAGTCATTTTGCTATTGGCCTAGCTCTCTACTACCCTTCTGCTCGCATAGTGTATACAGCTTGCTCTCA
TGCCGCTGTTGATGCACTATGTGAGAAGGCATTAAAATATTTGCCTATAGATAAATGTAGTAGAATTATACCTGCACGTGC
TCGTGTAGAGTGTTTTGATAAATTCAAAGTGAATTCAACATTAGAACAGTATGTCTTTTGTACTGTAAATGCATTGCCTGAG
ACGACAGCAGATATAGTTGTCTTTGATGAAATTTCAATGGCCACAAATTATGATTTGAGTGTTGTCAATGCCAGATTACGT
GCTAAGCACTATGTGTACATTGGCGACCCTGCTCAATTACCTGCACCACGCACATTGCTAACTAAGGGCACACTAGAACCA
GAATATTTCAATTCAGTGTGTAGACTTATGAAAACTATAGGTCCAGACATGTTCCTCGGAACTTGTCGGCGTTGTCCTGCTG
AAATTGTTGACACTGTGAGTGCTTTGGTTTATGATAATAAGCTTAAAGCACATAAAGACAAATCAGCTCAATGCTTTAAAAT
GTTTTATAAGGGTGTTATCACGCATGATGTTTCATCTGCAATTAACAGGCCACAAATAGGCGTGGTAAGAGAATTCCTTAC
ACGTAACCCTGCTTGGAGAAAAGCTGTCTTTATTTCACCTTATAATTCACAGAATGCTGTAGCCTCAAAGATTTTGGGACTA
CCAACTCAAACTGTTGATTCATCACAGGGCTCAGAATATGACTATGTCATATTCACTCAAACCACTGAAACAGCTCACTCTT
GTAATGTAAACAGATTTAATGTTGCTATTACCAGAGCAAAAGTAGGCATACTTTGCATAATGTCTGATAGAGACCTTTATG
ACAAGTTGCAATTTACAAGTCTTGAAATTCCACGTAGGAATGTGGCAACTTTACAAGCTGAAAATGTAACAGGACTCTTTA
AAGATTGTAGTAAGGTAATCACTGGGTTACATCCTACACAGGCACCTACACACCTCAGTGTTGACACTAAATTCAAAACTG
AAGGTTTATGTGTTGACATACCTGGCATACCTAAGGACATGACCTATAGAAGACTCATCTCTATGATGGGTTTTAAAATGA
ATTATCAAGTTAATGGTTACCCTAACATGTTTATCACCCGCGAAGAAGCTATAAGACATGTACGTGCATGGATTGGCTTCG
ATGTCGAGGGGTGTCATGCTACTAGAGAAGCTGTTGGTACCAATTTACCTTTACAGCTAGGTTTTTCTACAGGTGTTAACCT
AGTTGCTGTACCTACAGGTTATGTTGATACACCTAATAATACAGATTTTTCCAGAGTTAGTGCTAAACCACCGCCTGGAGAT
CAATTTAAACACCTCATACCACTTATGTACAAAGGACTTCCTTGGAATGTAGTGCGTATAAAGATTGTACAAATGTTAAGTG
ACACACTTAAAAATCTCTCTGACAGAGTCGTATTTGTCTTATGGGCACATGGCTTTGAGTTGACATCTATGAAGTATTTTGT
GAAAATAGGACCTGAGCGCACCTGTTGTCTATGTGATAGACGTGCCACATGCTTTTCCACTGCTTCAGACACTTATGCCTGT
TGGCATCATTCTATTGGATTTGATTACGTCTATAATCCGTTTATGATTGATGTTCAACAATGGGGTTTTACAGGTAACCTACA
AAGCAACCATGATCTGTATTGTCAAGTCCATGGTAATGCACATGTAGCTAGTTGTGATGCAATCATGACTAGGTGTCTAGC
TGTCCACGAGTGCTTTGTTAAGCGTGTTGACTGGACTATTGAATATCCTATAATTGGTGATGAACTGAAGATTAATGCGGC
TTGTAGAAAGGTTCAACACATGGTTGTTAAAGCTGCATTATTAGCAGACAAATTCCCAGTTCTTCACGACATTGGTAACCC
TAAAGCTATTAAGTGTGTACCTCAAGCTGATGTAGAATGGAAGTTCTATGATGCACAGCCTTGTAGTGACAAAGCTTATAA
AATAGAAGAATTATTCTATTCTTATGCCACACATTCTGACAAATTCACAGATGGTGTATGCCTATTTTGGAATTGCAATGTC
GATAGATATCCTGCTAATTCCATTGTTTGTAGATTTGACACTAGAGTGCTATCTAACCTTAACTTGCCTGGTTGTGATGGTG
GCAGTTTGTATGTAAATAAACATGCATTCCACACACCAGCTTTTGATAAAAGTGCTTTTGTTAATTTAAAACAATTACCATTT
TTCTATTACTCTGACAGTCCATGTGAGTCTCATGGAAAACAAGTAGTGTCAGATATAGATTATGTACCACTAAAGTCTGCTA
CGTGTATAACACGTTGCAATTTAGGTGGTGCTGTCTGTAGACATCATGCTAATGAGTACAGATTGTATCTCGATGCTTATAA
CATGATGATCTCAGCTGGCTTTAGCTTGTGGGTTTACAAACAATTTGATACTTATAACCTCTGGAACACTTTTACAAGACTTC
AGAGTTTAGAAAATGTGGCTTTTAATGTTGTAAATAAGGGACACTTTGATGGACAACAGGGTGAAGTACCAGTTTCTATCA
TTAATAACACTGTTTACACAAAAGTTGATGGTGTTGATGTAGAATTGTTTGAAAATAAAACAACATTACCTGTTAATGTAGC
ATTTGAGCTTTGGGCTAAGCGCAACATTAAACCAGTACCAGAGGTGAAAATACTCAATAATTTGGGTGTGGACATTGCTGC
TAATACTGTGATCTGGGACTACAAAAGAGATGCTCCAGCACATATATCTACTATTGGTGTTTGTTCTATGACTGACATAGCC
AAGAAACCAACTGAAACGATTTGTGCACCACTCACTGTCTTTTTTGATGGTAGAGTTGATGGTCAAGTAGACTTATTTAGA
AATGCCCGTAATGGTGTTCTTATTACAGAAGGTAGTGTTAAAGGTTTACAACCATCTGTAGGTCCCAAACAAGCTAGTCTT
AATGGAGTCACATTAATTGGAGAAGCCGTAAAAACACAGTTCAATTATTATAAGAAAGTTGATGGTGTTGTCCAACAATTA
CCTGAAACTTACTTTACTCAGAGTAGAAATTTACAAGAATTTAAACCCAGGAGTCAAATGGAAATTGATTTCTTAGAATTAG
CTATGGATGAATTCATTGAACGGTATAAATTAGAAGGCTATGCCTTCGAACATATCGTTTATGGAGATTTTAGTCATAGTCA
GTTAGGTGGTTTACATCTACTGATTGGACTAGCTAAACGTTTTAAGGAATCACCTTTTGAATTAGAAGATTTTATTCCTATG
GACAGTACAGTTAAAAACTATTTCATAACAGATGCGCAAACAGGTTCATCTAAGTGTGTGTGTTCTGTTATTGATTTATTAC
TTGATGATTTTGTTGAAATAATAAAATCCCAAGATTTATCTGTAGTTTCTAAGGTTGTCAAAGTGACTATTGACTATACAGA
AATTTCATTTATGCTTTGGTGTAAAGATGGCCATGTAGAAACATTTTACCCAAAATTACAATCTAGTCAAGCGTGGCAACCG
GGTGTTGCTATGCCTAATCTTTACAAAATGCAAAGAATGCTATTAGAAAAGTGTGACCTTCAAAATTATGGTGATAGTGCA
ACATTACCTAAAGGCATAATGATGAATGTCGCAAAATATACTCAACTGTGTCAATATTTAAACACATTAACATTAGCTGTAC
CCTATAATATGAGAGTTATACATTTTGGTGCTGGTTCTGATAAAGGAGTTGCACCAGGTACAGCTGTTTTAAGACAGTGGT
TGCCTACGGGTACGCTGCTTGTCGATTCAGATCTTAATGACTTTGTCTCTGATGCAGATTCAACTTTGATTGGTGATTGTGC
AACTGTACATACAGCTAATAAATGGGATCTCATTATTAGTGATATGTACGACCCTAAGACTAAAAATGTTACAAAAGAAAA
TGACTCTAAAGAGGGTTTTTTCACTTACATTTGTGGGTTTATACAACAAAAGCTAGCTCTTGGAGGTTCCGTGGCTATAAAG
ATAACAGAACATTCTTGGAATGCTGATCTTTATAAGCTCATGGGACACTTCGCATGGTGGACAGCCTTTGTTACTAATGTGA
ATGCGTCATCATCTGAAGCATTTTTAATTGGATGTAATTATCTTGGCAAACCACGCGAACAAATAGATGGTTATGTCATGCA
TGCAAATTACATATTTTGGAGGAATACAAATCCAATTCAGTTGTCTTCCTATTCTTTATTTGACATGAGTAAATTTCCCCTTA
AATTAAGGGGTACTGCTGTTATGTCTTTAAAAGAAGGTCAAATCAATGATATGATTTTATCTCTTCTTAGTAAAGGTAGACT
TATAATTAGAGAAAACAACAGAGTTGTTATTTCTAGTGATGTTCTTGTTAACAACTAAACGAACAATGTTTGTTTTTCTTGTT
TTATTGCCACTAGTCTCTAGTCAGTGTGTTAATCTTACAACCAGAACTCAATTACCCCCTGCATACACTAATTCTTTCACACG
TGGTGTTTATTACCCTGACAAAGTTTTCAGATCCTCAGTTTTACATTCAACTCAGGACTTGTTCTTACCTTTCTTTTCCAATGT
TACTTGGTTCCATGCTATACATGTCTCTGGGACCAATGGTACTAAGAGGTTTGCTAACCCTGTCCTACCATTTAATGATGGT
GTTTATTTTGCTTCCACTGAGAAGTCTAACATAATAAGAGGCTGGATTTTTGGTACTACTTTAGATTCGAAGACCCAGTCCC
TACTTATTGTTAATAACGCTACTAATGTTGTTATTAAAGTCTGTGAATTTCAATTTTGTAATGATCCATTTTTGGGTGTTTATT
ACCACAAAAACAACAAAAGTTGGATGGAAAGTGAGTTCAGAGTTTATTCTAGTGCGAATAATTGCACTTTTGAATATGTCT
CTCAGCCTTTTCTTATGGACCTTGAAGGAAAACAGGGTAATTTCAAAAATCTTAGGGAATTTGTGTTTAAGAATATTGATG
GTTATTTTAAAATATATTCTAAGCACACGCCTATTAATTTAGTGCGTGGTCTCCCTCAGGGTTTTTCGGCTTTAGAACCATTG
GTAGATTTGCCAATAGGTATTAACATCACTAGGTTTCAAANNNNNNCTTTACATAGAAGTTATTTGACTCCTGGTGATTCTT
CTTCAGGTTGGACAGCTGGTGCTGCAGCTTATTATGTGGGTTATCTTCAACCTAGGACTTTTCTATTAAAATATAATGAAA
ATGGAACCATTACAGATGCTGTAGACTGTGCACTTGACCCTCTCTCAGAAACAAAGTGTACGTTGAAATCCTTCACTGTAG
AAAAAGGAATCTATCAAACTTCTAACTTTAGAGTCCAACCAACAGAATCTATTGTTAGATTTCCTAATATTACAAACTTGTG
CCCTTTTGGTGAAGTTTTTAACGCCACCAGATTTGCATCTGTTTATGCTTGGAACAGGAAGAGAATCAGCAACTGTGTTGCT
GATTATTCTGTCCTATATAATTCCGCATCATTTTCCACTTTTAAGTGTTATGGAGTGTCTCCTACTAAATTAAATGATCTCTGC
TTTACTAATGTCTATGCAGATTCATTTGTAATTAGAGGTGATGAAGTCAGACAAATCGCTCCAGGGCAAACTGGAAATATT
GCTGATTATAATTATAAATTACCAGATGATTTTACAGGCTGCGTTATAGCTTGGAATTCTAACAATCTTGATTCTAAGGTTG
GTGGTAATTATAATTACCTGTATAGATTGTTTAGGAAGTCTAATCTCAAACCTTTTGAGAGAGATATTTCAACTGAAATCTA
TCAGGCCGGTAGCACACCTTGTAATGGTGTTAAAGGTTTTAATTGTTACTTTCCTTTACAATCATATGGTTTCCAACCCACTT
ATGGTGTTGGTTACCAACCATACAGAGTAGTAGTACTTTCTTTTGAACTTCTACATGCACCAGCAACTGTTTGTGGACCTAA
AAAGTCTACTAATTTGGTTAAAAACAAATGTGTCAATTTCAACTTCAATGGTTTAACAGGCACAGGTGTTCTTACTGAGTCT
AACAAAAAGTTTCTGCCTTTCCAACAATTTGGCAGAGACATTGCTGACACTACTGATGCTGTCCGTGATCCACAGACACTTG
AGATTCTTGACATTACACCATGTTCTTTTGGTGGTGTCAGTGTTATAACACCAGGAACAAATACTTCTAACCAGGTTGCTGT
TCTTTATCAGGGTGTTAACTGCACAGAAGTCCCTGTTGCTATTCATGCAGATCAACTTACTCCTACTTGGCGTGTTTATTCTA
CAGGTTCTAATGTTTTTCAAACACGTGCAGGCTGTTTAATAGGGGCTGAACATGTCAACAACTCATATGAGTGTGACATAC
CCATTGGTGCAGGTATATGCGCTAGTTATCAGACTCAGACTAATTCTCCTCGGGGGCACGTAGTGTAGCTAGTCAATCCA
TCATTGCCTACACTATGTCACTTGGTGTAGAAAATTCAGTTGCTTACTCTAATAACTCTATTGCCATACCCACAAATTTTACT
ATTAGTGTTACCACAGAAATTCTACCAGTGTCTATGACCAAGACATCAGTAGATTGTACAATGTACATTTGTGGTGATTCAA
CTGAATGCAGCAATCTTTTGTTGCAATATGGCAGTTTTTGTACACAATTAAACCGTGCTTTAACTGGAATAGCTGTTGAACA
AGACAAAAACACCCAAGAAGTTTTTGCACAAGTCAAACAAATTTACAAAACACCACCAATTAAAGATTTTGGTGGTTTTAA
TTTTTCACAAATATTACCAGATCCATCAAAACCAAGCAAGAGGTCATTTATTGAAGATCTACTTTTCAACAAAGTGACACTT
GCAGATGCTGGCTTCATCAAACAATATGGTGATTGCCTTGGTGATATTGCTGCTAGAGACCTCATTTGTGCACAAAAGTTT
AACGGCCTTACTGTTTTGCCACCTTTGCTCACAGATGAAATGATTGCTCAATACACTTCTGCACTGTTAGCGGGTACAATCA
CTTCTGGTTGGACCTTTGGTGCAGGTGCTGCATTACAAATACCATTTGCTATGCAAATGGCTTATAGGTTTAATGGTATTGG
AGTTACACAGAATGTTCTCTATGAGAACCAAAAATTGATTGCCAACCAATTTAATAGTGCTATTGGCAAAATTCAAGACTCA
CTTTCTTCCACAGCAAGTGCACTTGGAAAACTTCAAGATGTGGTCAACCAAAATGCACAAGCTTTAAACACGCTTGTTAAAC
AACTTAGCTCCAATTTTGGTGCAATTTCAAGTGTTTTAAATGATATCCTTTCACGTCTTGACAAAGTTGAGGCTGAAGTGCA
AATTGATAGGTTGATCACAGGCAGACTTCAAAGTTTGCAGACATATGTGACTCAACAATTAATTAGAGCTGCAGAAATCAG
AGCTTCTGCTAATCTTGCTGCTACTAAAATGTCAGAGTGTGTACTTGGACAATCAAAAAGAGTTGATTTTTGTGGAAAGGG
CTATCATCTTATGTCCTTCCCTCAGTCAGCACCTCATGGTGTAGTCTTCTTGCATGTGACTTATGTCCCTGCACAAGAAAAGA
ACTTCACAACTGCTCCTGCCATTTGTCATGATGGAAAAGCACACTTTCCTCGTGAAGGTGTCTTTGTTTCAAATGGCACACA
CTGGTTTGTAACACAAAGGAATTTTTATGAACCACAAATCATTACTACAGACAACACATTTGTGTCTGGTAACTGTGATGTT
GTAATAGGAATTGTCAACAACACAGTTTATGATCCTTTGCAACCTGAATTAGACTCATTCAAGGAGGAGTTAGATAAATAT
TTTAAGAATCATACATCACCAGATGTTGATTTAGGTGACATCTCTGGCATTAATGCTTCAGTTGTAAACATTCAAAAAGAAA
TTGACCGCCTCAATGAGGTTGCCAAGAATTTAAATGAATCTCTCATCGATCTCCAAGAACTTGGAAAGTATGAGCAGTATA
TAAAATGGCCATGGTACATTTGGCTAGGTTTTATAGCTGGCTTGATTGCCATAGTAATGGTGACAATTATGCTTTGCTGTAT
GACCAGTTGCTGTAGTTGTCTCAAGGGCTGTTGTTCTTGTGGATCCTGCTGCAAATTTGATGAAGACGACTCTGAGCCAGT
GCTCAAAGGAGTCAAATTACATTACACATAAACGAACTTATGGATTTGTTTATGAGAATCTTCACAATTGGAACTGTAACTT
TGAAGCAAGGTGAAATCAAGGATGCTACTCCTTCAGATTTTGTTCGCGCTACTGCAACGATACCGATACAAGCCTCACTCC
CTTTCGGATGGCTTATTGTTGGCGTTGCACTTCTTGCTGTTTTTCATAGCGCTTCCAAAATCATAACCCTCAAAAAGAGATG
GCAACTAGCACTCTCCAAGGGTGTTCACTTTGTTTGCAACTTGCTGTTGTTGTTTGTAACAGTTTACTCACACCTTTTGCTCG
TTGCTGCTGGCCTTGAAGCCCCTTTTCTCTATCTTTATGCTTTAGTCTACTTCTTGCAGAGTATAAACTTTGTAAGAATAATA
ATGAGGCTTTGGCTTTGCTGGAAATGCCGTTCCAAAAACCCATTACTTTATGATGCCAACTATTTTCTTTGCTGGCATACTAA
TTGTTACGACTATTGTATACCTTACAATAGTGTAACTTCTTCAATTGTCATTACTTTAGGTGATGGCACAACAAGTCCTATTT
CTGAACATGACTACCAGATTGGTGGTTATACTGAAAAATGGGAATCTGGAGTAAAAGACTGTGTTGTATTACACAGTTACT
TCACTTCAGACTATTACCAGCTGTACTCAACTCAATTGAGTACAGACACTGGTGTTGAACATGTTACCTTCTTCATCTACAAT
AAAATTGTTGATGAGCCTGAAGAACATGTCCAAATTCACACAATCGACGGTTCATCCGGAGTTGTTAATCCAGTAATGGAA
CCAATTTATGATGAACCGACGACGACTACTAGCGTGCCTTTGTAAGCACAAGCTGATGAGTACGAACTTATGTACTCATTC
GTTTCGGAAGAGACAGGTACGTTAATAGTTAATAGCGTACTTCTTTTTCTTGCTTTCGTGGTATTCTTGCTAGTTACACTAGC
CATCCTTACTGCGCTTCGATTGTGTGCGTACTGCTGCAATATTGTTAACGTGAGTCTTGTAAAACCTTCTTTTTACGTTTACT
CTCGTGTTAAAAATCTGAATTCTTCTAGAGTTCTTGATCTTCTGGTCTAAACGAACTAAATATTATATTAGTTTTTCTGTTTGG
AACTTTAATTTTAGCCATGGCAGATTCCAACGGTACTATTACCGTTGAAGAGCTTAAAAAGCTCCTTGAACAATGGAACCTA
GTAATAGGTTTCCTATTCCTTACATGGATTTGTCTTCTACAATTTGCCTATGCCAACAGGAATAGGTTTTTGTATATAATTAA
GTTAATTTTCCTCTGGCTGTTATGGCCAGTAACTTTAGCTTGTTTTGTGCTTGCTGCTGTTTACAGAATAAATTGGATCACCG
GTGGAATTGCTATCGCAATGGCTTGTCTTGTAGGCTTGATGTGGCTCAGCTACTTCATTGCTTCTTTCAGACTGTTTGCGCG
TACGCGTTCCATGTGGTCATTCAATCCAGAAACTAACATTCTTCTCAACGTGCCACTCCATGGCACTATTCTGACCAGACCG
CTTCTAGAAAGTGAACTCGTAATCGGAGCTGTGATCCTTCGTGGACATCTTCGTATTGCTGGACACCATCTAGGACGCTGT
GACATCAAGGACCTGCCTAAAGAAATCACTGTTGCTACATCACGAACGCTTTCTTATTACAAATTGGGAGCTTCGCAGCGT
GTAGCAGGTGACTCAGGTTTTGCTGCATACAGTCGCTACAGGATTGGCAACTATAAATTAAACACAGACCATTCCAGTAGC
AGTGACAATATTGCTTTGCTTGTACAGTAAGCGACAACAGATGTTTCATCTCGTTGACTTTCAGGTTACTATAGCAGAGATA
TTACTAATTATTATGAGGACTTTTAAAGTTTCCATTTGGAATCTTGATTACATCATAAACCTCATAATTAAAAATTTATCTAA
GTCACTAACTGAGAATAAATATTCTCAATTAGATGAAGAGCAACCAATGGAGATTGATTAAACGAACATGAAAATTATTCT
TTTCTTGGCACTGATAACACTCGCTACTTGTGAGCTTTATCACTACCAAGAGTGTGTTAGAGGTACAACAGTACTTTTAAAA
GAACCTTGCTCTTCTGGAACATACGAGGGCAATTCACCATTTCATCCTCTAGCTGATAACAAATTTGCACTGACTTGCTTTA
GCACTCAATTTGCTTTTGCTTGTCCTGACGGCGTAAAACACGTCTATCAGTTACGTGCCAGATCAGTTTCACCTAAACTGTTC
ATCAGACAAGAGGAAGTTCAAGAACTTTACTCTCCAATTTTTCTTATTGTTGCGGCAATAGTGTTTATAACACTTTGCTTCAC
ACTCAAAAGAAAGACAGAATGATTGAACTTTCATTAATTGACTTCTATTTGTGCTTTTTAGCCTTTCTGCTATTCCTTGTTTTA
ATTATGCTTATTATCTTTTGGTTCTCACTTGAACTGCAAGATCATAATGAAACTTGTCACGCCTAAACGAACATGAAATTTCT
TGTTTTCTTAGGAATCATCACAACTGTAGCTGCATTTCACCAAGAATGTAGTTTACAGTCATGTACTCAACATCAACCATAT
GTAGTTGATGACCCGTGTCCTATTCACTTCTATTCTAAATGGTATATTAGAGTAGGAGCTAGAAAATCAGCACCTTTAATTG
AATTGTGCGTGGATGAGGCTGGTTCTAAATCACCCATTCAGTACATCGATATCGGTAATTATACAGTTTCCTGTTTACCTTTT
ACAATTAATTGCCAGGAACCTAAATTGGGTAGTCTTGTAGTGCGTTGTTCGTTCTATGAAGACTTTTTAGAGTATCATGACG
TTCGTGTTGTTTTAGATTTTATCTAAACGAACAAACTAAAATGTCTGATAATGGACCCCAAAATCAGCGAAATGCACCCCGC
ATTACGTTTGGTGGACCCTCAGATTCAACTGGCAGTAACCAGAATGGAGAACGCAGTGGGGCGCGATCAAAACAACGTCG
GCCCCAAGGTTTACCCAATAATACTGCGTCTTGGTTCACCGCTCTCACTCAACATGGCAAGGAAGACCTTAAATTCCCTCGA
GGACAAGGCGTTCCAATTAACACCAATAGCAGTCCAGATGACCAAATTGGCTACTACCGAAGAGCTACCAGACGAATTCG
TGGTGGTGACGGTAAAATGAAAGATCTCAGTCCAAGATGGTATTTCTACTACCTAGGAACTGGGCCAGAAGCTGGACTT
CCCTATGGTGCTAACAAAGACGGCATCATATGGGTTGCAACTGAGGGAGCCTTGAATACACCAAAAGATCACATTGGCAC
CCGCAATCCTGCTAACAATGCTGCAATCGTGCTACAACTTCCTCAAGGAACAACATTGCCAAAAGGCTTCTACGCAGAAGG
GAGCAGAGGCGGCAGTCAAGCCTCTTCTCGTTCCTCATCACGTAGTCGCAACAGTTCAAGAAATTCAACTCCAGGCAGCAG
TAGGGGAATTTCTCCTGCTAGAATGGCTGGCAATGGCGGTGATGCTGCTCTTGCTTTGCTGCTGCTTGACAGATTGAACCA
GCTTGAGAGCAAAATGTCTGGTAAAGGCCAACAACAACAAGGCCAAACTGTCACTAAGAAATCTGCTGCTGAGGCTTCTA
AGAAGCCTCGGCAAAAACGTACTGCCACTAAAGCATACAATGTAACACAAGCTTTCGGCAGACGTGGTCCAGAACAAACC
CAAGGAAATTTTGGGGACCAGGAACTAATCAGACAAGGAACTGATTACAAACATTGGCCGCAAATTGCACAATTTGCCCC
CAGCGCTTCAGCGTTCTTCGGAATGTCGCGCATTGGCATGGAAGTCACACCTTCGGGAACGTGGTTGACCTACACAGGTG
CCATCAAATTGGATGACAAAGATCCAAATTTCAAAGATCAAGTCATTTTGCTGAATAAGCATATTGACGCATACAAAACATT
CCCACCAACAGAGCCTAAAAAGGACAAAAAGAAGAAGGCTGATGAAACTCAAGCCTTACCGCAGAGACAGAAGAAACAG
CAAACTGTGACTCTTCTTCCTGCTGCAGATTTGGATGATTTCTCCAAACAATTGCAACAATCCATGAGCAGTGCTGACTCAA
CTCAGGCCTAAACTCATGCAGACCACACAAGGCAGATGGGCTATATAAACGTTTTCGCTTTTCCGTTTACGATATATAGTCT
ACTCTTGTGCAGAATGAATTCTCGTAACTACATAGCACAAGTAGATGTAGTTAACTTTAATCTCACATAGCAATCTTTAATC
AGTGTGTAACATTAGGGAGGACTTGAAAGAGCCACCACATTTTCACCGAGGCCACGCGGAGTACGATCGAGTGTACAGTG
AACAATGCTAGGGAGAGCTGCCTATATGGAAGAGCCCTAATGTGTAAAATTAATTTTAGTAGTGCTATCCCCATGNNNNN
NNNNNNNNNNNNNNNNNNNNNNNNAAAAAAAAAAAAAAAAAAAAAAAAAAAAAAAAA
SEQ ID NO: 19
>SA_P2_gp02 surface glycoprotein, from genome accession SA_P2_t0.9_q20
MFVFLVLLPLVSSQCVNLTTRTQLPPAYTNSFTRGVYYPDKVFRSSVLHSTQDLFLPFFSNVTWFHAIHVSGTNGTKRFANPVLPF
NDGVYFASTEKSNIIRGWIFGTTLDSKTQSLLIVNNATNVVIKVCEFQFCNDPFLGVYYHKNNKSWMESEFRVYSSANNCTFEYV
SQPFLMDLEGKQGNFKNLREFVFKNIDGYFKIYSKHTPINLVRGLPQGFSALEPLVDLPIGINITRFQXXXLHRSYLTPGDSSSGWT
AGAAAYYVGYLQPRTFLLKYNENGTITDAVDCALDPLSETKCTLKSFTVEKGIYQTSNFRVQPTESIVRFPNITNLCPFGEVFNATR
FASVYAWNRKRISNCVADYSVLYNSASFSTFKCYGVSPTKLNDLCFTNVYADSFVIRGDEVRQIAPGQTGNIADYNYKLPDDFTG
CVIAWNSNNLDSKVGGNYNYLYRLFRKSNLKPFERDISTEIYQAGSTPCNGVKGFNCYFPLQSYGFQPTYGVGYQPYRVVVLSFE
LLHAPATVCGPKKSTNLVKNKCVNFNFNGLTGTGVLTESNKKFLPFQQFGRDIADTTDAVRDPQTLEILDITPCSFGGVSVITPGT
NTSNQVAVLYQGVNCTEVPVAIHADQLTPTWRVYSTGSNVFQTRAGCLIGAEHVNNSYECDIPIGAGICASYQTQTNSPRRARS
VASQSIIAYTMSLGVENSVAYSNNSIAIPTNFTISVTTEILPVSMTKTSVDCTMYICGDSTECSNILLQYGSFCTQLNRALTGIAVEQ
DKNTQEVFAQVKQIYKTPPIKDFGGFNFSQILPDPSKPSKRSFIEDLLFNKVTLADAGFIKQYGDCLGDIAARDLICAQKFNGLTVL
PPLLTDEMIAQYTSALLAGTITSGWTFGAGAALQIPFAMQMAYRFNGIGVTQNVLYENQKLIANQFNSAIGKIQDSLSSTASALG
KLQDVVNQNAQALNTLVKQLSSNFGAISSVLNDILSRLQKVEAEVQIDRLITGRLQSLQTYVTQQLIRAAEIRASANLAATKMSEC
VLGQSKRVDFCGKGYHLMSFPQSAPHGVVFLHVTYVPAQEKNFTTAPAICHDGKAHFPREGVFVSNGTHWFVTQRNFYEPQII
TTDNTFVSGNCDVVIGIVNNTVYDPLQPELDSFKEELDKYFKNHTSPDVDLGDISGINASVVNIQKEIDRLNEVAKNLNESLIDLQE
LGKYEQYIKWPWYIWLGFIAGLIAIVMVTIMLCCMTSCCSCLKGCCSCGSCCKFDEDDSEPVLKGVKLHYT
SEQ ID NO: 20
>MW520923.1 Severe acute respiratory syndrome coronavirus 2 isolate SARS-CoV-2/human/USA/MN-MDH-
2399/2021, complete genome, example of Brazilian P1 lineage.
CAACTTTCGATCTCTTGTAGATCTGTTCTCTAAACGAACTTTAAAATCTGTGTGGCTGTCACTCGGCTGCATGCTTAGTG
CACTCACGCAGTATAATTAATAACTAATTACTGTCGTTGACAGGACACGAGTAACTCGTCTATCTTCTGCAGGCTGCTTA
CGGTTTCGTCCGTGTTGCAGCCGATCATCAGCACATCTAGGTTTTGTCCGGGTGTGACCGAAAGGTAAGATGGAGAGCCT
TGTCCCTGGTTTCAACGAGAAAACACACGTCCAACTCAGTTTGCCTGTTTTACAGGTTCGCGACGTGCTCGTACGTGGCT
TTGGAGACTCCGTGGAGGAGGTCTTATCAGAGGCACGTCAACATCTTAAAGATGGCACTTGTGGCTTAGTAGAAGTTGAA
AAAGGCGTTTTGCCTCAACTTGAACAGCCCTATGTGTTCATCAAACGTTCGGATGCTCGAACTGCACCTCATGGTCATGT
TATGGTTGAGCTGGTAGCAGAACTCGAAGGCATTCAGTACGGTCGTAGTGGTGAGACACTTGGTGTCCTTGTCCCTCATG
TGGGCGAAATACCAGTGGCTTACCGCAAGGTTCTTCTTCGTAAGAACGGTAATAAAGGAGCTGGTGGCCATAGTTACGGC
GCCGATCTAAAGTCATTTGACTTAGGCGACGAGCTTGGCACTGATCCTTATGAAGACTTTCAAGAAAACTGGAACACTAA
ACATAGCAGTGGTGTTACCCGTGAACTCATGCGTGAGCTTAACGGAGGGGCATACACTCGCTATGTCGATAACAACTTCT
GTGGCCCTGATGGCTACCCTCTTGAGTGCATTAAAGACCTTCTAGCACGTGCTGGTAAAGCTTCATGCACTTTGTCCGAA
CAACTGGACTTTATTGACACTAAGAGGGGTGTATACTGCTGCCGTGAACATGAGCATGAAATTGCTTGGTACACGGAACG
TTCTGAAAAGAGCTATGAATTGCAGACACCTTTTGAAATTAAATTGGCAAAGAAATTTGACACCTTCAATGGGGAATGTC
CAAATTTTGTATTTCCCTTAAATTCCATAATCAAGACTATTCAACCAAGGGTTGAAAAGAAAAAGCTTGATGGCTTTATG
GGTAGAATTCGATCTGTCTATCCAGTTGCGTCACCAAATGAATGCAACCAAATGTGCCTTTCAACTCTCATGAAGTGTGA
TCATTGTGGTGAAACTTCATGGCAGACGGGCGATTTTGTTAAAGCCACTTGCGAATTTTGTGGCACTGAGAATTTGACTA
AAGAAGGTGCCACTACTTGTGGTTACTTACCCCAAAATGCTGTTGTTAAAATTTATTGTCCAGCATGTCACAATTCAGAA
GTAGGACCTGAGCATAGTCTTGCCGAATACCATAATGAATCTGGCTTGAAAACCATTCTTCGTAAGGGTGGTCGCACTAT
TGCCTTTGGAGGCTGTGTGTTCTCTTATGTTGGTTGCCATAACAAGTGTGCCTATTGGGTTCCACGTGCTAGCGCTAACA
TAGGTTGTAACCATACAGGTGTTGTTGGAGAAGGTTCCGAAGGTCTTAATGACAACCTTCTTGAAATACTCCAAAAAGAG
AAAGTCAACATCAATATTGTTGGTGACTTTAAACTTAATGAAGAGATCGCCATTATTTTGGCATCTTTTTCTGCTTCCAC
AAGTGCTTTTGTGGAAACTGTGAAAGGTTTGGATTATAAAGCATTCAAACAAATTGTTGAATCCTGTGGTAATTTTAAAG
TTACAAAAGGAAAAGCTAAAAAAGGTGCCTGGAATATTGGTGAACAGAAATCAATACTGAGTCCTCTTTATGCATTTGCA
TCAGAGGCTGCTCGTGTTGTACGATCAATTTTCTCCCGCACTCTTGAAACTGCTCAAAATTCTGTGCGTGTTTTACAGAA
GGCCGCTATAACAATACTAGATGGAATTTCACAGTATTCACTGAGACTCATTGATGCTATGATGTTCACATCTGATTTGG
CTACTAACAATCTAGTTGTAATGGCCTACATTACAGGTGGTGTTGTTCAGTTGACTTCGCAGTGGCTAACTAACATCTTT
GGCACTGTTTATGAAAAACTCAAACCCGTCCTTGATTGGCTTGAAGAGAAGTTTAAGGAAGGTGTAGAGTTTCTTAGAGA
CGGTTGGGAAATTGTTAAATTTATCTCAACCTGTGCTTGTGAAATTGTCGGTGGACAAATTGTCACCTGTGCAAAGGAAA
TTAAGGAGAGTGTTCAGACATTCTTTAAGCTTGTAAATAAATTTTTGGCTTTGTGTGCTGACTCTATCATTATTGGTGGA
GCTAAACTTAAAGCCTTGAATTTAGGTGAAACATTTGTCACGCACTCAAAGGGATTGTACAGAAAGTGTGTTAAATCCAG
AGAAGAAACTGGCCTACTCATGCCTCTAAAAGCCCCAAAAGAAATTATCTTCTTAGAGGGAGAAACACTTCCCACAGAAG
TGTTAACAGAGGAAGTTGTCTTGAAAACTGGTGATTTACAACCATTAGAACAACCTACTAGTGAAGCTGTTGAAGCTCCA
TTGGTTGGTACACCAGTTTGTATTAACGGGCTTATGTTGCTCGAAATCAAAGACACAGAAAAGTACTGTGCCCTTGCACC
TAATATGATGGTAACAAACAATACCTTCACACTCAAAGGCGGTGCACCAACAAAGGTTACTTTTGGTGATGATACTGTGA
TAGAAGTGCAAGGTTACAAGAGTGTGAATATCACTTTTGAACTTGATGAAAGGATTGATAAAGTACTTAATGAGAAGTGC
TCTGCCTATACAGTTGAACTCGGTACAGAAGTAAATGAGTTCGCCTGTGTTGTGGCAGATGCTGTCATAAAAACTTTGCA
ACCAGTATCTGAATTACTTACACCACTGGGCATTGATTTAGATGAGTGGAGTATGGCTACATACTACTTATTTGATGAGT
CTGGTGAGTTTAAATTGGCTTCACATATGTATTGTTCTTTTTACCCTCCAGATGAGGATGAAGAAGAAGGTGATTGTGAA
GAAGAAGAGTTTGAGCCATCAACTCAATATGAGTATGGTACTGAAGATGATTACCAAGGTAAACCTTTGGAATTTGGTGC
CACTTCTGCTGCTCTTCAACCTGAAGAAGAGCAAGAAGAAGATTGGTTAGATGATGATAGTCAACAAACTGTTGGTCAAC
AAGACGGCAGTGAGGACAATCAGACAACTACTATTCAAACAATTGTTGAGGTTCAACCTCAATTAGAGATGGAACTTACA
CCAGTTGTTCAGACTATTGAAGTGAATAGTTTTAGTGGTTATTTAAAACTTACTGACAATGTATACATTAAAAATGCAGA
CATTGTGGAAGAAGCTAAAAAGGTAAAACCAACAGTGGTTGTTAATGCAGCCAATGTTTACCTTAAACATGGAGGAGGTG
TTGCAGGAGCCTTAAATAAGGCTACTAACAATGCCATGCAAGTTGAATCTGATGATTACATAGCTACTAATGGACCACTT
AAAGTGGGTGGTAGTTGTGTTTTAAGCGGACACAATCTTGCTAAACACTGTCTTCATGTTGTCGGCCCAAATGTTAACAA
AGGTGAAGACATTCAACTTCTTAAGAGTGCTTATGAAAATTTTAATCAGCACGAAGTTCTACTTGCACCATTATTATCAG
CTGGTATTTTTGGTGCTGACCCTATACATTCTTTAAGAGTTTGTGTAGATACTGTTCGCACAAATGTCTACTTAGCTGTC
TTTGATAAAAATCTCTATGACAAACTTGTTTTAAGCTTTTTGGAAATGAAGAGTGAAAAGCAAGTTGAACAAAAGATCGC
TGAGATTCCTAAAGAGGAAGTTAAGCCATTTATAACTGAAAGTAAACCTTCAGTTGAACAGAGAAAACAAGATGATAAGA
AAATCAAAGCTTGTGTTGAAGAAGTTACAACAACTCTGGAAGAAACTAAGTTCCTCACAGAAAACTTGTTACTTTATATT
GACATTAATGGCAATCTTCATCCAGATTCTGCCACTCTTGTTAGTGACATTGACATCACTTTCTTAAAGAAAGATGCTCC
ATATATAGTGGGTGATGTTGTTCAAGAGGGTGTTTTAACTGCTGTGGTTATACCTACTAAAAAGGCTGGTGGCACTACTG
AAATGCTAGCGAAAGCTTTGAGAAAAGTGCCAACAGACAATTATATAACCACTTACCCGGGTCAGGGTTTAAATGGTTAC
ACTGTAGAGGAGGCAAAGACAGTGCTTAAAAAGTGTAAAAGTGCCTTTTACATTCTACCATCTATTATCTCTAATGAGAA
GCAAGAAATTCTTGGAACTGTTTCTTGGAATTTGCGAGAAATGCTTGCACATGCAGAAGAAACACGCAAATTAATGCCTG
TCTGTGTGGAAACTAAAGCCATAGTTTCAACTATACAGCGTAAATATAAGGGTATTAAAATACAAGAGGGTGTGGTTGAT
TATGGTGCTAGATTTTACTTTTACACCAGTAAAACAACTGTAGCGTCACTTATCAACACACTTAACGATCTAAATGAAAC
TCTTGTTACAATGCCACTTGGCTATGTAACACATGGCTTAAATTTGGAAGAAGCTGCTCGGTATATGAGATCTCTCAAAG
TGCCAGCTACAGTTTCTGTTTCTTCACCTGATGCTGTTACAGCGTATAATGGTTATCTTACTTCTTCTTCTAAAACACCT
GAAGAACATTTTATTGAAACCATCTCACTTGCTGGTTCCTATAAAGATTGGTCCTATTCTGGACAATCTACACAACTAGG
TATAGAATTTCTTAAGAGAGGTGATAAAAGTGTATATTACACTAGTAATCCTACCACATTCCACCTAGATGGTGAAGTTA
TCACCTTTGACAATCTTAAGACACTTCTTTCTTTGAGAGAAGTGAGGACTATTAAGGTGTTTACAACAGTAGACAACATT
AACCTCCACACGCAAGTTGTGGACATGTCAATGACATATGGACAACAGTTTGGTCCAACTTATTTGGATGGAGCTGATGT
TACTAAAATAAAACCTCATAATTCACATGAAGGTAAAACATTTTATGTTTTACCTAATGATGACACTCTACGTGTTGAGG
CTTTTGAGTACTACCACACAACTGATCCTAGTTTTCTGGGTAGGTACATGTCAGCATTAAATCACACTAAAAAGTGGAAA
TACCCACAAGTTAATGGTTTAACTTCTATTAAATGGGCAGATAACAACTGTTATCTTGCCACTGCATTGTTAACACTCCA
ACAAATAGAGTTGAAGTTTAATCCACCTGCTCTACAAGATGCTTATTACAGAGCAAGGGCTGGTGAAGCTGCTAACTTTT
GTGCACTTATCTTAGCCTACTGTAATAAGACAGTAGGTGAGTTAGGTGATGTTAGAGAAACAATGAGTTACTTGTTTCAA
CATGCCAATTTAGATTCTTGCAAAAGAGTCTTGAACGTGGTGTGTAAAACTTGTGGACAACAGCAGACAACCCTTAAGGG
TGTAGAAGCTGTTATGTACATGGGCACACTTTCTTATGAACAATTTAAGAAAGGTGTTCAGATACCTTGTACGTGTGGTA
AACAAGCTACACAATATCTAGTACAACAGGAGTCACCTTTTGTTATGATGTCAGCACCACCTGCTCAGTATGAACTTAAG
CATGGTACATTTACTTGTGCTAGTGAGTACACTGGTAATTACCAGTGTGGTCACTATAAACATATAACTTCTAAAGAAAC
TTTGTATTGCATAGACGGTGCTTTACTTACAAAGTCCTCAGAATACAAAGGTCCTATTACGGATGTTTTCTACAAAGAAA
ACAGTTACACAACAACCATAAAACCAGTTACTTATAAATTGGATGGTGTTGTTTGTACAGAAATTGACCCTAAGTTGGAC
AATTATTATAAGAAAGACAATTCTTATTTCACAGAGCAACCAATTGATCTTGTACCAAACCAACCATATCCAAACGCAAG
CTTCGATAATTTTAAGTTTGTATGTGATAATATCAAATTTGCTGATGATTTAAACCAGTTAACTGGTTATAAGAAACCTG
CTTCAAGAGAGCTTAAAGTTACATTTTTCCCTGACTTAAATGGTGATGTGGTGGCTATTGATTATAAACACTACACACCC
TCTTTTAAGAAAGGAGCTAAATTGTTACATAAACCTATTGTTTGGCATGTTAACAATGCAACTAATAAAGCCACGTATAA
ACCAAATACCTGGTGTATACGTTGTCTTTGGAGCACAAAACCGGTTGAAACATCAAATTCGTTTGATGTACTGAAGTCAG
AGGACGCGCAGGGAATGGATAATCTTGCCTGCGAAGATCTAAAACCAGTCTCTGAAGAAGTAGTGGAAAATCCTACCATA
CAGAAAGACGTTCTTGAGTGTAATGTGAAAACTACCGAAGTTGTAGGAGACATTATACTTAAACCAGCAAATAATAGTTT
AAAAATTACAGAAGAGGTTGGCCACACAGATCTAATGGCTGCTTATGTAGACAATTCTAGTCTTACTATTAAGAAACCTA
ATGAATTATCTAGAGTGTTAGGTTTGAAAACCCTTGCTACTCATGGTTTAGCTGCTGTTAATAGTGTCCCTTGGGATACT
ATAGCTAATTATGCTAAGCCTTTTCTTAACAAAGTTGTTAGTACAACTACTAACATAGTTACACGGTGTTTAAACCGTGT
TTGTACTAATTATATGCCTTATTTCTTTACTTTATTGCTACAATTGTGTACTTTTACTAGAAGTACAAATTCTAGAATTA
AAGCATCTATGCCGACTACTATAGCAAAGAATACTGTTAAGAGTGTCGGTAAATTTTGTCTAGAGGCTTCATTTAATTAT
TTGAAGTCACCTAATTTTTCTAAACTGATAAATATTATAATTTGGTTTTTACTATTAAGTGTTTGCCTAGGTTCTTTAAT
CTACTCAACCGCTGCTTTAGGTGTTTTAATGTCTAATTTAGGCATGCCTTCTTACTGTACTGGTTACAGAGAAGGCTATT
TGAACTCTACTAATGTCACTATTGCAACCTACTGTACTGGTTCTATACCTTGTAGTGTTTGTCTTAGTGGTTTAGATTCT
TTAGACACCTATCCTTCTTTAGAAACTATACAAATTACCATTTCATCTTTTAAATGGGATTTAACTGCTTTTGGCTTAGT
TGCAGAGTGGTTTTTGGCATATATTCTTTTCACTAGGTTTTTCTATGTACTTGGATTGGCTGCAATCATGCAATTGTTTT
TCAGCTATTTTGCAGTACATTTTATTAGTAATTCTTGGCTTATGTGGTTAATAATTAATCTTGTACAAATGGCCCCGATT
TCAGCTATGGTTAGAATGTACATCTTCTTTGCATCATTTTATTATGTATGGAAAAGTTATGTGCATGTTGTAGACGGTTG
TAATTCATCAACTTGTATGATGTGTTACAAACGTAATAGAGCAACAAGAGTCGAATGTACAACTATTGTTAATGGTGTTA
GAAGGTCCTTTTATGTCTATGCTAATGGAGGTAAAGGCTTTTGCAAACTACACAATTGGAATTGTGTTAATTGTGATACA
TTCTGTGCTGGTAGTACATTTATTAGTGATGAAGTTGCGAGAGACTTGTCACTACAGTTTAAAAGACCAATAAATCCTAC
TGACCAGTCTTCTTACATCGTTGATAGTGTTACAGTGAAGAATGGTTCCATCCATCTTTACTTTGATAAAGCTGGTCAAA
AGACTTATGAAAGACATTCTCTCTCTCATTTTGTTAACTTAGACAACCTGAGAGCTAATAACACTAAAGGTTCATTGCCT
ATTAATGTTATAGTTTTTGATGGTAAATCAAAATGTGAAGAATCATCTGCAAAATCAGCGTCTGTTTACTACAGTCAGCT
TATGTGTCAACCTATACTGTTACTAGATCAGGCATTAGTGTCTGATGTTGGTGATAGTGCGGAAGTTGCAGTTAAAATGT
TTGATGCTTACGTTAATACGTTTTCATCAACTTTTAACGTACCAATGGAAAAACTCAAAACACTAGTTGCAACTGCAGAA
GCTGAACTTGCAAAGAATGTGTCCTTAGACAATGTCTTATCTACTTTTATTTCAGCAGCTCGGCAAGGGTTTGTTGATTC
AGATGTAGAAACTAAAGATGTTGTTGAATGTCTTAAATTGTCACATCAATCTGACATAGAAGTTACTGGCGATAGTTGTA
ATAACTATATGCTCACCTATAACAAAGTTGAAAACATGACACCCCGTGACCTTGGTGCTTGTATTGACTGTAGTGCGCGT
CATATTAATGCGCAGGTAGCAAAAAGTCACAACATTGCTTTGATATGGAACGTTAAAGATTTCATGTCATTGTCTGAACA
ACTACGAAAACAAATACGTAGTGCTGCTAAAAAGAATAACTTACCTTTTAAGTTGACATGTGCAACTACTAGACAAGTTG
TTAATGTTGTAACAACAAAGATAGCACTTAAGGGTGGTAAAATTGTTAATAATTGGTTGAAGCAGTTAATTAAAGTTACA
CTTGTGTTCCTTTTTGTTGCTGCTATTTTCTATTTAATAACACCTGTTCATGTCATGTCTAAACATACTGACTTTTCAAG
TGAAATCATAGGATACAAGGCTATTGATGGTGGTGTCACTCGTGACATAGCATCTACAGATACTTGTTTTGCTAACAAAC
ATGCTGATTTTGACACATGGTTTAGCCAGCGTGGTGGTAGTTATACTAATGACAAAGCTTGCCCATTGATTGCTGCAGTC
ATAACAAGAGAAGTGGGTTTTGTCGTGCCTGGTTTGCCTGGCACGATATTACGCACAACTAATGGTGACTTTTTGCATTT
CTTACCTAGAGTTTTTAGTGCAGTTGGTAACATCTGTTACACACCATCAAAACTTATAGAGTACACTGACTTTGCAACAT
CAGCTTGTGTTTTGGCTGCTGAATGTACAATTTTTAAAGATGCTTCTGGTAAGCCAGTACCATATTGTTATGATACCAAT
GTACTAGAAGGTTCTGTTGCTTATGAAAATTTACGCCCTGACACACGTTATGTGCTCATGGATGGCTCTATTATTCAATT
TCCTAACACCTACCTTGAAGGTTCTGTTAGAGTGGTAACAACTTTTGATTCTGAGTACTGTAGGCACGGCACTTGTGAAA
GATCAGAAGCTGGTGTTTGTGTATCTACTAGTGGTAGATGGGTACTTAACAATGATTATTACAGATCTTTACCAGGAGTT
TTCTGTGGTGTAGATGCTGTAAATTTACTTACTAATATGTTTACACCACTAATTCAACCTATTGGTGCTTTGGACATATC
AGCATCTATAGTAGCTGGTGGTATTGTAGCTATCGTAGTAACATGCCTTGCCTACTATTTTATGAGGTTTAGAAGAGCTT
TTGGTGAATACAGTCATGTAGTTGCCTTTAATACTTTACTATTCCTTATGTCATTCACTGTACTCTGTTTAACACCAGTT
TACTCATTCTTACCTGGTGTTTATTCTGTTATTTACTTGTACTTGACATTTTATCTTACTAATGATGTTTCTTTTTTAGC
ACATATTCAGTGGATGGTTATGTTCACACCTTTAGTACCTTTCTGGATAACAATTGCTTATATCATTTGTATTTCCACAA
AGCATTTCTATTGGTTCTTTAGTAATTACCTAAAGAGACGTGTAGTCTTTAATGGTGTTTCCTTTAGTACTTTTGAAGAA
GCTGCGCTGTGCACCTTTTTGTTAAATAAAGAAATGTATCTAAAGTTGCGTAGTGATGTGCTATTACCTCTTACGCAATA
TAATAGATACTTAGCTCTTTATAATAAGTACAAGTATTTTAGTGGAGCAATGGATACAACTAGCTACAGAGAAGCTGCTT
GTTGTCATCTCGCAAAGGCTCTCAATGACTTCAGTAACTCAGGTTCTGATGTTCTTTACCAACCACCACAAACCTCTATC
ACCTCAGCTGTTTTGCAGAGTGGTTTTAGAAAAATGGCATTCCCATCTGGTAAAGTTGAGGGTTGTATGGTACAAGTAAC
TTGTGGTACAACTACACTTAACGGTCTTTGGCTTGATGACGTAGTTTACTGTCCAAGACATGTGATCTGCACCTCTGAAG
ACATGCTTAACCCTAATTATGAAGATTTACTCATTCGTAAGTCTAATCATAATTTCTTGGTACAGGCTGGTAATGTTCAA
CTCAGGGTTATTGGACATTCTATGCAAAATTGTGTACTTAAGCTTAAGGTTGATACAGCCAATCCTAAGACACCTAAGTA
TAAGTTTGTTCGCATTCAACCAGGACAGACTTTTTCAGTGTTAGCTTGTTACAATGGTTCACCATCTGGTGTTTACCAAT
GTGCTATGAGGCCCAATTTCACTATTAAGGGTTCATTCCTTAATGGTTCATGTGGTAGTGTTGGTTTTAACATAGATTAT
GACTGTGTCTCTTTTTGTTACATGCACCATATGGAATTACCAACTGGAGTTCATGCTGGCACAGACTTAGAAGGTAACTT
TTATGGACCTTTTGTTGACAGGCAAACAGCACAAGCAGCTGGTACGGACACAACTATTACAGTTAATGTTTTAGCTTGGT
TGTACGCTGCTGTTATAAATGGAGACAGGTGGTTTCTCAATCGATTTACCACAACTCTTAATGACTTTAACCTTGTGGCT
ATGAAGTACAATTATGAACCTCTAACACAAGACCATGTTGACATACTAGGACCTCTTTCTGCTCAAACTGGAATTGTCGT
TTTAGATATGTGTGCTTCATTAAAAGAATTACTGCAAAATGGTATGAATGGACGTACCATATTGGGTAGTGCTTTATTAG
AAGATGAATTTACACCTTTTGATGTTGTTAGACAATGCTCAGGTGTTACTTTCCAAAGTGCAGTGAAAAGAACAATCAAG
GGTACACACCACTGGTTGTTACTCACAATTTTGACTTCACTTTTAGTTTTAGTCCAGAGTACTCAATGGTCTTTGTTCTT
TTTTTTGTATGAAAATGCCTTTTTACCTTTTGCTATGGGTATTATTGCTATGTCTGCTTTTGCAATGATGTTTGTCAAAC
ATAAGCATGCATTTCTCTGTTTGTTTTTGTTACCTTCTCTTGCCACTGTAGCTTATTTTAATATGGTCTATATGCCTGCT
AGTTGGGTGATGCGTATTATGACATGGTTGGATATGGTTGATACTAGTTTGAAGCTAAAAGACTGTGTTATGTATGCATC
AGCTGTAGTGTTACTAATCCTTATGACAGCAAGAACTGTGTATGATGATGGTGCTAGGAGAGTGTGGACACTTATGAATG
TCTTGACACTCGTTTATAAAGTTTATTATGGTAATGCTTTAGATCAAGCCATTTCCATGTGGGCTCTTATAATCTCTGTT
ACTTCTAACTACTCAGGTGTAGTTACAACTGTCATGTTTTTGGCCAGAGGTATTGTTTTTATGTGTGTTGAGTATTGCCC
TATTTTCTTCATAACTGGTAATACACTTCAGTGTATAATGCTAGTTTATTGTTTCTTAGGCTATTTTTGTACTTGTTACT
TTGGCCTCTTTTGTTTACTCAACCGCTACTTTAGACTGACTCTTGGTGTTTATGATTACTTAGTTTCTACACAGGAGTTT
AGATATATGAATTCACAGGGACTACTCCCACCCAAGAATAGCATAGATGCCTTCAAACTCAACATTAAATTGTTGGGTGT
TGGTGGCAAACCTTGTATCAAAGTAGCCACTGTACAGTCTAAAATGTCAGATGTAAAGTGCACATCAGTAGTCTTACTCT
CAGTTTTGCAACAACTCAGAGTAGAATCATCATCTAAATTGTGGGCTCAATGTGTCCAGTTACACAATGACATTCTCTTA
GCTAAAGATACTACTGAAGCCTTTGAAAAAATGGTTTCACTACTTTCTGTTTTGCTTTCCATGCAGGGTGCTGTAGACAT
AAACAAGCTTTGTGAAGAAATGCTGGACAACAGGGCAACCTTACAAGCTATAGCCTCAGAGTTTAGTTCCCTTCCATCAT
ATGCAGCTTTTGCTACTGCTCAAGAAGCTTATGAGCAGGCTGTTGCTAATGGTGATTCTGAAGTTGTTCTTAAAAAGTTG
AAGAAGTCTTTGAATGTGGCTAAATCTGAATTTGACCGTGATGCAGCCATGCAACGTAAGTTGGAAAAGATGGCTGATCA
AGCTATGACCCAAATGTATAAACAGGCTAGATCTGAGGACAAGAGGGCAAAAGTTACTAGTGCTATGCAGACAATGCTTT
TCACTATGCTTAGAAAGTTGGATAATGATGCACTCAACAACATTATCAACAATGCAAGAGATGGTTGTGTTCCCTTGAAC
ATAATACCTCTTACAACAGCAGCCAAACTAATGGTTGTCATACCAGACTATAACACATATAAAAATACGTGTGATGGTAC
AACATTTACTTATGCATCAGCATTGTGGGAAATCCAACAGGTTGTAGATGCAGATAGTAAAATTGTTCAACTTAGTGAAA
TTAGTATGGACAATTCACCTAATTTAGCATGGCCTCTTATTGTAACAGCTTTAAGGGCCAATTCTGCTGTCAAATTACAG
AATAATGAGCTTAGTCCTGTTGCACTACGACAGATGTCTTGTGCTGCCGGTACTACACAAACTGCTTGCACTGATGACAA
TGCGTTAGCTTATTACAACACAACAAAGGGAGGTAGGTTTGTACTTGCACTGTTATCCGATTTACAGGATTTGAAATGGG
CTAGATTCCCTAAGAGTGATGGAACTGGTACTATCTATACAGAACTGGAACCACCTTGTAGGTTTGTTACAGACACACCT
AAAGGTCCTAAAGTGAAGTATTTATACTTTATTAAAGGATTAAACAACCTAAATAGAGGTATGGTACTTGGTAGTTTAGC
TGCCACAGTACGTCTACAAGCTGGTAATGCAACAGAAGTGCCTGCCAATTCAACTGTATTATCTTTCTGTGCTTTTGCTG
TAGATGCTGCTAAAGCTTACAAAGATTATCTAGCTAGTGGGGGACAACCAATCACTAATTGTGTTAAGATGTTGTGTACA
CACACTGGTACTGGTCAGGCAATAACAGTTACACCGGAAGCCAATATGGATCAAGAATCCTTTGGTGGTGCATCGTGTTG
TCTGTACTGCCGTTGCCACATAGATCATCCAAATCCTAAAGGATTTTGTGACTTAAAAGGTAAGTATGTACAAATACCTA
CAACTTGTGCTAATGÅCCCTGTGGGTTTTACACTTAAAAACACAGTCTGTACCGTCTGCGGTATGTGGAAAGGTTATGGC
TGTAGTTGTGATCAACTCCGCGAACCCATGCTTCAGTCAGCTGATGCACAATCGTTTTTAAACGGGTTTGCGGTGTAAGT
GCAGCCCGTCTTACACCGTGCGGCACAGGCACTAGTACTGATGTCGTATACAGGGCTTTTGACATCTACAATGATAAAGT
AGCTGGTTTTGCTAAATTCCTAAAAACTAATTGTTGTCGCTTCCAAGAAAAGGACGAAGATGACAATTTAATTGATTCTT
ACTTTGTAGTTAAGAGACACACTTTCTCTAACTACCAACATGAAGAAACAATTTATAATTTACTTAAGGATTGTCCAGCT
GTTGCTAAACATGACTTCTTTAAGTTTAGAATAGACGGTGACATGGTACCACATATATCACGTCAACGTCTTACTAAATA
CACAATGGCAGACCTCGTCTATGCTTTAAGGCATTTTGATGAAGGTAATTGTGATACATTAAAAGAAATACTTGTCACAT
ACAATTGTTGTGATGATGATTATTTCAATAAAAAGGACTGGTATGATTTTGTAGAAAACCCAGATATATTACGCGTATAC
GCCAACTTAGGTGAACGTGTACGCCAAGCTTTGTTAAAAACAGTACAATTCTGTGATGCCATGCGAAATGCTGGTATTGT
TGGTGTACTGACATTAGATAATCAAGATCTCAATGGTAACTGGTATGATTTCGGTGATTTCATACAAACCACGCCAGGTA
GTGGAGTTCCTGTTGTAGATTCTTATTATTCATTGTTAATGCCTATATTAACCTTGACCAGGGCTTTAACTGCAGAGTCA
CATGTTGACACTGACTTAACAAAGCCTTACATTAAGTGGGATTTGTTAAAATATGACTTCACGGAAGAGAGGTTAAAACT
CTTTGACCGTTATTTTAAATATTGGGATCAGACATACCACCCAAATTGTGTTAACTGTTTGGATGACAGATGCATTCTGC
ATTGTGCAAACTTTAATGTTTTATTCTCTACAGTGTTCCCACTTACAAGTTTTGGACCACTAGTGAGAAAAATATTTGTT
GATGGTGTTCCATTTGTAGTTTCAACTGGATACCACTTCAGAGAGCTAGGTGTTGTACATAATCAGGATGTAAACTTACA
TAGCTCTAGACTTAGTTTTAAGGAATTACTTGTGTATGCTGCTGACCCTGCTATGCACGCTGCTTCTGGTAATCTATTAC
TAGATAAACGCACTACGTGCTTTTCAGTAGCTGCACTTACTAACAATGTTGCTTTTCAAACTGTCAAACCCGGTAATTTT
AACAAAGACTTCTATGACTTTGCTGTGTCTAAGGGTTTCTTTAAGGAAGGAAGTTCTGTTGAATTAAAACACTTCTTCTT
TGCTCAGGATGGTAATGCTGCTATCAGCGATTATGACTACTATCGTTATAATCTACCAACAATGTGTGATATCAGACAAC
TACTATTTGTAGTTGAAGTTGTTGATAAGTACTTTGATTGTTACGATGGTGGCTGTATTAATGCTAACCAAGTCATCGTC
AACAACCTAGACAAATCAGCTGGTTTTCCATTTAATAAATGGGGTAAGGCTAGACTTTATTATGATTCAATGAGTTATGA
GGATCAAGATGCACTTTTCGCATATACAAAACGTAATGTCATCCCTACTATAACTCAAATGAATCTTAAGTATGCCATTA
GTGCAAAGAATAGAGCTCGCACCGTAGCTGGTGTCTCTATCTGTAGTACTATGACCAATAGACAGTTTCATCAAAAATTA
TTGAAATCAATAGCCGCCACTAGAGGAGCTACTGTAGTAATTGGAACAAGCAAATTCTATGGTGGTTGGCACAACATGTT
AAAAACTGTTTATAGTGATGTAGAAAACCCTCACCTTATGGGTTGGGATTATCCTAAATGTGATAGAGCCATGCCTAACA
TGCTTAGAATTATGGCCTCACTTGTTCTTGCTCGCAAACATACAACGTGTTGTAGCTTGTCACACCGTTTCTATAGATTA
GCTAATGAGTGTGCTCAAGTATTGAGTGAAATGGTCATGTGTGGCGGTTCACTATATGTTAAACCAGGTGGAACCTCATC
AGGAGATGCCACAACTGCTTATGCTAATAGTGTTTTTAACATTTGTCAAGCTGTCACGGCCAATGTTAATGCACTTTTAT
CTACTGATGGTAACAAAATTGCCGATAAGTATGTCCGCAATTTACAACACAGACTTTATGAGTGTCTCTATAGAAATAGA
GATGTTGACACAGACTTTGTGAATGAGTTTTACGCATATTTGCGTAAACATTTCTCAATGATGATACTCTCTGACGATGC
TGTTGTGTGTTTCAATAGCACTTATGCATCTCAAGGTCTAGTGGCTAGCATAAAGAACTTTAAGTCAGTTCTTTATTATC
AAAACAATGTTTTTATGTCTGAAGCAAAATGTTGGACTGAGACTGACCTTACTAAAGGACCTCATGAATTTTGCTCTCAA
CATACAATGCTAGTTAAACAGGGTGATGATTATGTGTACCTTCCTTACCCAGATCCATCAAGAATCCTAGGGGCCGGCTG
TTTTGTAGATGATATCGTAAAAACAGATGGTACACTTATGATTGAACGGTTCGTGTCTTTAGCTATAGATGCTTACCCAC
TTACTAAACATCCTAATCAGGAGTATGCTGATGTCTTTCATTTGTACTTACAATACATAAGAAAGCTACATGATGAGTTA
ACAGGACACATGTTAGACATGTATTCTGTTATGCTTACTAATGATAACACTTCAAGGTATTGGGAACCTGAGTTTTATGA
GGCTATGTACACACCGCATACAGTCTTACAGGCTGTTGGGGCTTGTGTTCTTTGCAATTCACAGACTTCATTAAGATGTG
GTGCTTGCATACGTAGACCATTCTTATGTTGTAAATGCTGTTACGACCATGTCATATCAACATCACATAAATTAGTCTTG
TCTGTTAATCCGTATGTTTGCAATGCTCCAGGTTGTGATGTCACAGATGTGACTCAACTTTACTTAGGAGGTATGAGCTA
TTATTGTAAATCACATAAACCACCCATTAGTTTTCCATTGTGTGCTAATGGACAAGTTTTTGGTTTATATAAAAATACAT
GTGTTGGTAGCGATAATGTTACTGACTTTAATGCAATTGCAACATGTGACTGGACAAATGCTGGTGATTACATTTTAGCT
AACACCTGTACTGAAAGACTCAAGCTTTTTGCAGCAGAAACGCTCAAAGCTACTGAGGAGACATTTAAACTGTCTTATGG
TATTGCTACTGTACGTGAAGTGCTGTCTGACAGAGAATTACATCTTTCATGGGAAGTTGGTAAACCTAGACCACCACTTA
ACCGAAATTATGTCTTTACTGGTTATCGTGTAACTAAAAACAGTAAAGTACAAATAGGAGAGTACACCTTTGAAAAAGGT
GACTATGGTGATGCTGTTGTTTACCGAGGTACAACAACTTACAAATTAAATGTTGGTGATTATTTTGTGCTGACATCACA
TACAGTAATGCCATTAAGTGCACCTACACTAGTGCCACAAGAGCACTATGTTAGAATTACTGGCTTATACCCAACACTCA
ATATCTCAGATGAGTTTTCTAGCAATGTTGCAAATTATCAAAAGGTTGGTATGCAAAAGTATTCTACACTCCAGGGACCA
CCTGGTACTGGTAAGAGTCATTTTGCTATTGGCCTAGCTCTCTACTACCCTTCTGCTCGCATAGTGTATACAGCTTGCTC
TCATGCCGCTGTTGATGCACTATGTGAGAAGGCATTAAAATATTTGCCTATAGATAAATGTAGTAGAATTATACCTGCAC
GTGCTCGTGTAGATTGTTTTGATAAATTCAAAGTGAATTCAACATTAGAACAGTATGTCTTTTGTACTGTAAATGCATTG
CCTGAGACGACAGCAGATATAGTTGTCTTTGATGAAATTTCAATGGCCACAAATTATGATTTGAGTGTTGTCAATGCCAG
ATTACGTGCTAAGCACTATGTGTACATTGGCGACCCTGCTCAATTACCTGCACCACGCACATTGCTAACTAAGGGCACAC
TAGAACCAGAATATTTCAATTCAGTGTGTAGACTTATGAAAACTATAGGTCCAGACATGTTCCTCGGAACTTGTCGGCGT
TGTCCTGCTGAAATTGTTGACACTGTGAGTGCTTTGGTTTATGATAATAAGCTTAAAGCACATAAAGACAAATCAGCTCA
ATGCTTTAAAATGTTTTATAAGGGTGTTATCACGCATGATGTTTCATCTGCAATTAACAGGCCACAAATAGGCGTGGTAA
GAGAATTCCTTACACGTAACCCTGCTTGGAGAAAAGCTGTCTTTATTTCACCTTATAATTCACAGAATGCTGTAGCCTCA
AAGATTTTGGGACTACCAACTCAAACTGTTGATTCATCACAGGGCTCAGAATATGACTATGTCATATTCACTCAAACCAC
TGAAACAGCTCACTCTTGTAATGTAAACAGATTTAATGTTGCTATTACCAGAGCAAAAGTAGGCATACTTTGCATAATGT
CTGATAGAGACCTTTATGACAAGTTGCAATTTACAAGTCTTGAAATTCCACGTAGGAATGTGGCAACTTTACAAGCTGAA
AATGTAACAGGACTCTTTAAAGATTGTAGTAAGGTAATCACTGGGTTACATCCTACACAGGCACCTACACACCTCAGTGT
TGACACTAAATTCAAAACTGAAGGTTTATGTGTTGACATACCTGGCATACCTAAGGACATGACCTATAGAAGACTCATCT
CTATGATGGGTTTTAAAATGAATTATCAAGTTAATGGTTACCCTAACATGTTTATCACCCGCGAAGAAGCTATAAGACAT
GTACGTGCATGGATTGGCTTCGATGTCGAGGGGTGTCATGCTACTAGAGAAGCTGTTGGTACCAATTTACCTTTACAGCT
AGGTTTTTCTACAGGTGTTAACCTAGTTGCTGTACCTACAGGTTATGTTGATACACCTAATAATACAGATTTTTCCAGAG
TTAGTGCTAAACCACCGCCTGGAGATCAATTTAAACACCTCATACCACTTATGTACAAAGGACTTCCTTGGAATGTAGTG
CGTATAAAGATTGTACAAATGTTAAGTGACACACTTAAAAATCTCTCTGACAGAGTCGTATTTGTCTTATGGGCACATGG
CTTTGAGTTGACATCTATGAAGTATTTTGTGAAAATAGGACCTGAGCGCACCTGTTGTCTATGTGATAGACGTGCCACAT
GCTTTTCCACTGCTTCAGACACTTATGCCTGTTGGCATCATTCTATTGGATTTGATTACGTCTATAATCCGTTTATGATT
GATGTTCAACAATGGGGTTTTACAGGTAACCTACAAAGCAACCATGATCTGTATTGTCAAGTCCATGGTAATGCACATGT
AGCTAGTTGTGATGCAATCATGACTAGGTGTCTAGCTGTCCACGAGTGCTTTGTTAAGCGTGTTGACTGGACTATTGAAT
ATCCTATAATTGGTGATGAACTGAAGATTAATGCGGCTTGTAGAAAGGTTCAACACATGGTTGTTAAAGCTGCATTATTA
GCAGACAAATTCCCAGTTCTTCACGACATTGGTAACCCTAAAGCTATTAAGTGTGTACCTCAAGCTGATGTAGAATGGAA
GTTCTATGATGCACAGCCTTGTAGTGACAAAGCTTATAAAATAGAAGAATTATTCTATTCTTATGCCACACATTCTGACA
AATTCACAGATGGTGTATGCCTATTTTGGAATTGCAATGTCGATAGATATCCTGCTAATTCCATTGTTTGTAGATTTGAC
ACTAGAGTGCTATCTAACCTTAACTTGCCTGGTTGTGATGGTGGCAGTTTGTATGTAAATAAACATGCATTCCACACACC
AGCTTTTGATAAAAGTGCTTTTGTTAATTTAAAACAATTACCATTTTTCTATTACTCTGACAGTCCATGTGAGTCTCATG
GAAAACAAGTAGTGTCAGATATAGATTATGTACCACTAAAGTCTGCTACGTGTATAACACGTTGCAATTTAGGTGGTGCT
GTCTGTAGACATCATGCTAATGAGTACAGATTGTATCTCGATGCTTATAACATGATGATCTCAGCTGGCTTTAGCTTGTG
GGTTTACAAACAATTTGATACTTATAACCTCTGGAACACTTTTACAAGACTTCAGAGTTTAGAAAATGTGGCTTTTAATG
TTGTAAATAAGGGACACTTTGATGGACAACAGGGTGAAGTACCAGTTTCTATCATTAATAACACTGTTTACACAAAAGTT
GATGGTGTTGATGTAGAATTGTTTGAAAATAAAACAACATTACCTGTTAATGTAGCATTTGAGCTTTGGGCTAAGCGCAA
CATTAAACCAGTACCAGAGGTGAAAATACTCAATAATTTGGGTGTGGACATTGCTGCTAATACTGTGATCTGGGACTACA
AAAGAGATGCTCCAGCACATATATCTACTATTGGTGTTTGTTCTATGACTGACATAGCCAAGAAACCAACTGAAACGATT
TGTGCACCACTCACTGTCTTTTTTGATGGTAGAGTTGATGGTCAAGTAGACTTATTTAGAAATGCCCGTAATGGTGTTCT
TATTACAGAAGGTAGTGTTAAAGGTTTACAACCATCTGTAGGTCCCAAACAAGCTAGTCTTAATGGAGTCACATTAATTG
GAGAAGCCGTAAAAACACAGTTCAATTATTATAAGAAAGTTGATGGTGTTGTCCAACAATTACCTGAAACTTACTTTACT
CAGAGTAGAAATTTACAAGAATTTAAACCCAGGAGTCAAATGGAAATTGATTTCTTAGAATTAGCTATGGATGAATTCAT
TGAACGGTATAAATTAGAAGGCTATGCCTTCGAACATATCGTTTATGGAGATTTTAGTCATAGTCAGTTAGGTGGTTTAC
ATCTACTGATTGGACTAGCTAAACGTTTTAAGGAATCACCTTTTGAATTAGAAGATTTTATTCCTATGGACAGTACAGTT
AAAAACTATTTCATAACAGATGCGCAAACAGGTTCATCTAAGTGTGTGTGTTCTGTTATTGATTTATTACTTGATGATTT
TGTTGAAATAATAAAATCCCAAGATTTATCTGTAGTTTCTAAGGTTGTCAAAGTGACTATTGACTATACAGAAATTTCAT
TTATGCTTTGGTGTAAAGATGGCCATGTAGAAACATTTTACCCAAAATTACAATCTAGTCAAGCGTGGCAACCGGGTGTT
GCTATGCCTAATCTTTACAAAATGCAAAGAATGCTATTAGAAAAGTGTGACCTTCAAAATTATGGTGATAGTGCAACATT
ACCTAAAGGCATAATGATGAATGTCGCAAAATATACTCAACTGTGTCAATATTTAAACACATTAACATTAGCTGTACCCT
ATAATATGAGAGTTATACATTTTGGTGCTGGTTCTGATAAAGGAGTTGCACCAGGTACAGCTGTTTTAAGACAGTGGTTG
CCTACGGGTACGCTGCTTGTCGATTCAGATCTTAATGACTTTGTCTCTGATGCAGATTCAACTTTGATTGGTGATTGTGC
AACTGTACATACAGCTAATAAATGGGATCTCATTATTAGTGATATGTACGACCCTAAGACTAAAAATGTTACAAAAGAAA
ATGACTCTAAAGAGGGTTTTTTCACTTACATTTGTGGGTTTATACAACAAAAGCTAGCTCTTGGAGGTTCCGTGGCTATA
AAGATAACAGAACATTCTTGGAATGCTGATCTTTATAAGCTCATGGGACACTTCGCATGGTGGACAGCCTTTGTTACTAA
TGTGAATGCGTCATCATCTGAAGCATTTTTAATTGGATGTAATTATCTTGGCAAACCACGCGAACAAATAGATGGTTATG
TCATGCATGCAAATTACATATTTTGGAGGAATACAAATCCAATTCAGTTGTCTTCCTATTCTTTATTTGACATGAGTAAA
TTTCCCCTTAAATTAAGGGGTACTGCTGTTATGTCTTTAAAAGAAGGTCAAATCAATGATATGATTTTATCTCTTCTTAG
TAAAGGTAGACTTATAATTAGAGAAAACAACAGAGTTGTTATTTCTAGTGATGTTCTTGTTAACAACTAAACGAACAATG
TTTGTTTTTCTTGTTTTATTGCCACTAGTCTCTAGTCAGTGTGTTAATTTTACAAACAGAACTCAATTACCCTCTGCATA
CACTAATTCTTTCACACGTGGTGTTTATTACCCTGACAAAGTTTTCAGATCCTCAGTTTTACATTCAACTCAGGACTTGT
TCTTACCTTTCTTTTCCAATGTTACTTGGTTCCATGCTATACATGTCTCTGGGACCAATGGTACTAAGAGGTTTGATAAC
CCTGTCCTACCATTTAATGATGGTGTTTATTTTGCTTCCACTGAGAAGTCTAACATAATAAGAGGCTGGATTTTTGGTAC
TACTTTAGATTCGAAGACCCAGTCCCTACTTATTGTTAATAACGCTACTAATGTTGTTATTAAAGTCTGTGAATTTCAAT
TTTGTAATTATCCATTTTTGGGTGTTTATTACCACAAAAACAACAAAAGTTGGATGGAAAGTGAGTTCAGAGTTTATTCT
AGTGCGAATAATTGCACTTTTGAATATGTCTCTCAGCCTTTTCTTATGGACCTTGAAGGAAAACAGGGTAATTTCAAAAA
TCTTAGTGAATTTGTGTTTAAGAATATTGATGGTTATTTTAAAATATATTCTAAGCACACGCCTATTAATTTAGTGCGTG
ATCTCCCTCAGGGTTTTTCGGCTTTAGAACCATTGGTAGATTTGCCAATAGGTATTAACATCACTAGGTTTCAAACTTTA
CTTGCTTTACATAGAAGTTATTTGACTCCTGGTGATTCTTCTTCAGGTTGGACAGCTGGTGCTGCAGCTTATTATGTGGG
TTATCTTCAACCTAGGACTTTTCTATTAAAATATAATGAAAATGGAACCATTACAGATGCTGTAGACTGTGCACTTGACC
CTCTCTCAGAAACAAAGTGTACGTTGAAATCCTTCACTGTAGAAAAAGGAATCTATCAAACTTCTAACTTTAGAGTCCAA
CCAACAGAATCTATTGTTAGATTTCCTAATATTACAAACTTGTGCCCTTTTGGTGAAGTTTTTAACGCCACCAGATTTGC
ATCTGTTTATGCTTGGAACAGGAAGAGAATCAGCAACTGTGTTGCTGATTATTCTGTCCTATATAATTCCGCATCATTTT
CCACTTTTAAGTGTTATGGAGTGTCTCCTACTAAATTAAATGATCTCTGCTTTACTAATGTCTATGCAGATTCATTTGTA
ATTAGAGGTGATGAAGTCAGACAAATCGCTCCAGGGCAAACTGGAACGATTGCTGATTATAATTATAAATTACCAGATGA
TTTTACAGGCTGCGTTATAGCTTGGAATTCTAACAATCTTGATTCTAAGGTTGGTGGTAATTATAATTACCTGTATAGAT
TGTTTAGGAAGTCTAATCTCAAACCTTTTGAGAGAGATATTTCAACTGAAATCTATCAGGCCGGTAGCACACCTTGTAAT
GGTGTTAAAGGTTTTAATTGTTACTTTCCTTTACAATCATATGGTTTCCAACCCACTTATGGTGTTGGTTACCAACCATA
CAGAGTAGTAGTACTTTCTTTTGAACTTCTACATGCACCAGCAACTGTTTGTGGACCTAAAAAGTCTACTAATTTGGTTA
AAAACAAATGTGTCAATTTCAACTTCAATGGTTTAACAGGCACAGGTGTTCTTACTGAGTCTAACAAAAAGTTTCTGCCT
TTCCAACAATTTGGCAGAGACATTGCTGACACTACTGATGCTGTCCGTGATCCACAGACACTTGAGATTCTTGACATTAC
ACCATGTTCTTTTGGTGGTGTCAGTGTTATAACACCAGGAACAAATACTTCTAATCAGGTTGCTGTTCTTTATCAGGGTG
TTAACTGCACAGAAGTCCCTGTTGCTATTCATGCAGATCAACTTACTCCTACTTGGCGTGTTTATTCTACAGGTTCTAAT
GTTTTTCAAACACGTGCAGGCTGTTTAATAGGGGCTGAATATGTCAACAACTCATATGAGTGTGACATACCCATTGGTGC
AGGTATATGCGCTAGTTATCAGACTCAGACTAATTCTCCTCGGGGGGCACGTAGTGTAGCTAGTCAATCCATCATTGCCT
ACACTATGTCACTTGGTGCAGAAAATTCAGTTGCTTACTCTAATAACTCTATTGCCATACCCACAAATTTTACTATTAGT
GTTACCACAGAAATTCTACCAGTGTCTATGACCAAGACATCAGTAGATTGTACAATGTACATTTGTGGTGATTCAACTGA
ATGCAGCAATCTTTTGTTGCAATATGGCAGTTTTTGTACACAATTAAACCGTGCTTTAACTGGAATAGCTGTTGAACAAG
ACAAAAACACCCAAGAAGTTTTTGCACAAGTCAAACAAATTTACAAAACACCACCAATTAAAGATTTTGGTGGTTTTAAT
TTTTCACAAATATTACCAGATCCATCAAAACCAAGCAAGAGGTCATTTATTGAAGATCTACTTTTCAACAAAGTGACACT
TGCAGATGCTGGCTTCATCAAACAATATGGTGATTGCCTTGGTGATATTGCTGCTAGAGACCTCATTTGTGCACAAAAGT
TTAACGGCCTTACTGTTTTGCCACCTTTGCTCACAGATGAAATGATTGCTCAATACACTTCTGCACTGTTAGCGGGTACA
ATCACTTCTGGTTGGACCTTTGGTGCAGGTGCTGCATTACAAATACCATTTGCTATGCAAATGGCTTATAGGTTTAATGG
TATTGGAGTTACACAGAATGTTCTCTATGAGAACCAAAAATTGATTGCCAACCAATTTAATAGTGCTATTGGCAAAATTC
AAGACTCACTTTCTTCCACAGCAAGTGCACTTGGAAAACTTCAAGATGTGGTCAACCAAAATGCACAAGCTTTAAACACG
CTTGTTAAACAACTTAGCTCCAATTTTGGTGCAATTTCAAGTGTTTTAAATGATATCCTTTCACGTCTTGACAAAGTTGA
GGCTGAAGTGCAAATTGATAGGTTGATCACAGGCAGACTTCAAAGTTTGCAGACATATGTGACTCAACAATTAATTAGAG
CTGCAGAAATCAGAGCTTCTGCTAATCTTGCTGCTATTAAAATGTCAGAGTGTGTACTTGGACAATCAAAAAGAGTTGAT
TTTTGTGGAAAGGGCTATCATCTTATGTCCTTCCCTCAGTCAGCACCTCATGGTGTAGTCTTCTTGCATGTGACTTATGT
CCCTGCACAAGAAAAGAACTTCACAACTGCTCCTGCCATTTGTCATGATGGAAAAGCACACTTTCCTCGTGAAGGTGTCT
TTGTTTCAAATGGCACACACTGGTTTGTAACACAAAGGAATTTTTATGAACCACAAATCATTACTACAGACAACACATTT
GTGTCTGGTAACTGTGATGTTGTAATAGGAATTGTCAACAACACAGTTTATGATCCTTTGCAACCTGAATTAGACTCATT
CAAGGAGGAGTTAGATAAATATTTTAAGAATCATACATCACCAGATGTTGATTTAGGTGACATCTCTGGCATTAATGCTT
CATTTGTAAACATTCAAAAAGAAATTGACCGCCTCAATGAGGTTGCCAAGAATTTAAATGAATCTCTCATCGATCTCCAA
GAACTTGGAAAGTATGAGCAGTATATAAAATGGCCATGGTACATTTGGCTAGGTTTTATAGCTGGCTTGATTGCCATAGT
AATGGTGACAATTATGCTTTGCTGTATGACCAGTTGCTGTAGTTGTCTCAAGGGCTGTTGTTCTTGTGGATCCTGCTGCA
AATTTGATGAAGACGACTCTGAGCCAGTGCTCAAAGGAGTCAAATTACATTACACATAAACGAACTTATGGATTTGTTTA
TGAGAATCTTCACAATTGGAACTGTAACTTTGAAGCAAGGTGAAATCAAGGATGCTACTCCTTCAGATTTTGTTCGCGCT
ACTGCAACGATACCGATACAAGCCTCACTCCCTTTCGGATGGCTTATTGTTGGCGTTGCACTTCTTGCTGTTTTTCAGAG
CGCTTCCAAAATCATAACCCTCAAAAAGAGATGGCAACTAGCACTCTCCAAGGGTGTTCACTTTGTTTGCAACTTGCTGT
TGTTGTTTGTAACAGTTTACTCACACCTTTTGCTCGTTGCTGCTGGCCTTGAAGCCCCTTTTCTCTATCTTTATGCTTTA
GTCTACTTCTTGCAGAGTATAAACTTTGTAAGAATAATAATGAGGCTTTGGCTTTGCTGGAAATGCCGTTCCAAAAACCC
ATTACTTTATGATGCCAACTATTTTCTTTGCTGGCATACTAATTGTTACGACTATTGTATACCTTACAATAGTGTAACTT
CTTCAATTGTCATTACTTCAGGTGATGGCACAACAAGTCCTATTTCTGAACATGACTACCAGATTGGTGGTTATACTGAA
AAATGGGAATCTGGAGTAAAAGACTGTGTTGTATTACACAGTTACTTCACTTCAGACTATTACCAGCTGTACTCAACTCA
ATTGAGTACAGACACTGGTGTTGAACATGTTACCTTCTTCATCTACAATAAAATTGTTGATGAGCCTGAAGAACATGTCC
AAATTCACACAATCGACGGTTCACCCGGAGTTGTTAATCCAGTAATGGAACCAATTTATGATGAACCGACGACGACTACT
AGCGTGCCTTTGTAAGCACAAGCTGATGAGTACGAACTTATGTACTCATTCGTTTCGGAAGAGACAGGTACGTTAATAGT
TAATAGCGTACTTCTTTTTCTTGCTTTCGTGGTATTCTTGCTAGTTACACTAGCCATCCTTACTGCGCTTCGATTGTGTG
CGTACTGCTGCAATATTGTTAACGTGAGTCTTGTAAAACCTTCTTTTTACGTTTACTCTCGTGTTAAAAATCTGAATTCT
TCTAGAGTTCCTGATCTTCTGGTCTAAACGAACTAAATATTATATTAGTTTTTCTGTTTGGAACTTTAATTTTAGCCATG
GCAGATTCCAACGGTACTATTACCGTTGAAGAGCTTAAAAAGCTCCTTGAACAATGGAACCTAGTAATAGGTTTCCTATT
CCTTACATGGATTTGTCTTCTACAATTTGCCTATGCCAACAGGAATAGGTTTTTGTATATAATTAAGTTAATTTTCCTCT
GGCTGTTATGGCCAGTAACTTTAGCTTGTTTTGTGCTTGCTGCTGTTTACAGAATAAATTGGATCACCGGTGGAATTGCT
ATCGCAATGGCTTGTCTTGTAGGCTTGATGTGGCTCAGCTACTTCATTGCTTCTTTCAGACTGTTTGCGCGTACGCGTTC
CATGTGGTCATTCAATCCAGAAACTAACATTCTTCTCAACGTGCCACTCCATGGCACTATTCTGACCAGACCGCTTCTAG
AAAGTGAACTCGTAATCGGAGCTGTGATCCTTCGTGGACATCTTCGTATTGCTGGACACCATCTAGGACGCTGTGACATC
AAGGACCTGCCTAAAGAAATCACTGTTGCTACATCACGAACGCTTTCTTATTACAAATTGGGAGCTTCGCAGCGTGTAGC
AGGTGACTCAGGTTTTGCTGCATACAGTCGCTACAGGATTGGCAACTATAAATTAAACACAGACCATTCCAGTAGCAGTG
ACAATATTGCTTTGCTTGTACAGTAAGTGACAACAGATGTTTCATCTCGTTGACTTTCAGGTTACTATAGCAGAGATATT
ACTAATTATTATGAGGACTTTTAAAGTTTCCATTTGGAATCTTGATTACATCATAAACCTCATAATTAAAAATTTATCTA
AGTCACTAACTGAGAATAAATATTCTCAATTAGATGAAGAGCAACCAATGGAGATTGATTAAACGAACATGAAAATTATT
CTTTTCTTGGCACTGATAACACTCGCTACTTGTGAGCTTTATCACTACCAAGAGTGTGTTAGAGGTACAACAGTACTTTT
AAAAGAACCTTGCTCTTCTGGAACATACGAGGGCAATTCACCATTTCATCCTCTAGCTGATAACAAATTTGCACTGACTT
GCTTTAGCACTCAATTTGCTTTTGCTTGTCCTGACGGCGTAAAACACGTCTATCAGTTACGTGCCAGATCAGTTTCACCT
AAACTGTTCATCAGACAAGAGGAAGTTCAAGAACTTTACTCTCCAATTTTTCTTATTGTTGCGGCAATAGTGTTTATAAC
ACTTTGCTTCACACTCAAAAGAAAGACAGAATGATTGAACTTTCATTAATTGACTTCTATTTGTGCTTTTTAGCCTTTCT
GCTATTCCTTGTTTTAATTATGCTTATTATCTTTTGGTTCTCACTTGAACTGCAAGATCATAATGAAACTTGTCACGCCT
AAACGAACATGAAATTTCTTGTTTTCTTAGGAATCATCACAACTGTAGCTGCATTTCACCAAGAATGTAGTTTACAGTCA
TGTACTCAACATCAACCATATGTAGTTGATGACCCGTGTCCTATTCACTTCTATTCTAAATGGTATATTAGAGTAGGAGC
TAGAAAATCAGCACCTTTAATTGAATTGTGCGTGGATGAGGCTGGTTCTAAATCACCCATTCAGTACATCGATATCGGTA
ATTATACAGTTTCCTGTTTACCTTTTACAATTAATTGCCAGAAACCTAAATTGGGTAGTCTTGTAGTGCGTTGTTCGTTC
TATGAAGACTTTTTAGAGTATCATGACGTTCGTGTTGTTTTAGATTTCATCTAAACGAACAAACAAACTAAAATGTCTGA
TAATGGACCCCAAAATCAGCGAAATGCACCCCGCATTACGTTTGGTGGACCCTCAGATTCAACTGGCAGTAACCAGAATG
GAGAACGCAGTGGGGCGCGATCAAAACAACGTCGGCCCCAAGGTTTACCCAATAATACTGCGTCTTGGTTCACCGCTCTC
ACTCAACATGGCAAGGAAGACCTTAAATTCCCTCGAGGACAAGGCGTTCCAATTAACACCAATAGCAGTCGAGATGACCA
AATTGGCTACTACCGAAGAGCTACCAGACGAATTCGTGGTGGTGACGGTAAAATGAAAGATCTCAGTCCAAGATGGTATT
TCTACTACCTAGGAACTGGGCCAGAAGCTGGACTTCCCTATGGTGCTAACAAAGACGGCATCATATGGGTTGCAACTGAG
GGAGCCTTGAATACACCAAAAGATCACATTGGCACCCGCAATCCTGCTAACAATGCTGCAATCGTGCTACAACTTCCTCA
AGGAACAACATTGCCAAAAGGCTTCTACGCAGAAGGGAGCAGAGGCGGCAGTCAAGCCTCTTCTCGTTCCTCATCACGTA
GTCGCAACAGTTCAAGAAATTCAACTCCAGGCAGCTCTAAACGAACTTCTCCTGCTAGAATGGCTGGCAATGGCGGTGAT
GCTGCTCTTGCTTTGCTGCTGCTTGACAGATTGAACCAGCTTGAGAGCAAAATGTCTGGTAAAGGCCAACAACAACAAGG
CCAAACTGTCACTAAGAAATCTGCTGCTGAGGCTTCTAAGAAGCCTCGGCAAAAACGTACTGCCACTAAAGCATACAATG
TAACACAAGCTTTCGGCAGACGTGGTCCAGAACAAACCCAAGGAAATTTTGGGGACCAGGAACTAATCAGACAAGGAACT
GATTACAAACATTGGCCGCAAATTGCACAATTTGCCCCCAGCGCTTCAGCGTTCTTCGGAATGTCGCGCATTGGCATGGA
AGTCACACCTTCGGGAACGTGGTTGACCTACACAGGTGCCATCAAATTGGATGACAAAGATCCAAATTTCAAAGATCAAG
TCATTTTGCTGAATAAGCATATTGACGCATACAAAACATTCCCACCAACAGAGCCTAAAAAGGACAAAAAGAAGAAGGCT
GATGAAACTCAAGCCTTACCGCAGAGACAGAAGAAACAGCAAACTGTGACTCTTCTTCCTGCTGCAGATTTGGATGATTT
CTCCAAACAATTGCAACAATCCATGAGCAGTGCTGACTCAACTCAGGCCTAAACTCATGCAGACCACACAAGGCAGATGG
GCTATATAAACGTTTTCGCTTTTCCGTTTACGATATATAGTCTACTCTTGTGCAGAATGAATTCTCGTAACTACATAGCA
CAAGTAGATGTAGTTAACTTTAATCTCACATAGCAATCTTTAATCAGTGTGTAACATTAGGGAGGACTTGAAAGAGCCAC
CACATTTTCACCGAGGCCACGCGGAGTACGATCGAGTGTACAGTGAACAATGCTAGGGAGAGCTGCCTATATGGAAGAGC
CCTAATGTGTAAAATTAATTTTAGTAGTGCTAACCCCATGTGATTTTAATAGCTTCTTA
SEQ ID NO: 21
>QQX12069.1 surface glycoprotein, from genome accession MW520923
MFVFLVLLPLVSSQCVNFTNRTQLPSAYTNSFTRGVYYPDKVFRSSVLHSTQDLFLPFFSNVTWFHAIHVSGTNGTKRFDNPVLP
FNDGVYFASTEKSNIIRGWIFGTTLDSKTQSLLIVNNATNVVIKVCEFQFCNYPFLGVYYHKNNKSWMESEFRVYSSANNCTFEY
VSQPFLMDLEGKQGNFKNLSEFVFKNIDGYFKIYSKHTPINLVRDLPQGFSALEPLVDLPIGINITRFQTLLALHRSYLTPGDSSSG
WTAGAAAYYVGYLQPRTFLLKYNENGTITDAVDCALDPLSETKCTLKSFTVEKGIYQTSNFRVQPTESIVRFPNITNLCPFGEVFN
ATRFASVYAWNRKRISNCVADYSVLYNSASFSTFKCYGVSPTKLNDLCFTNVYADSFVIRGDEVRQIAPGQTGTIADYNYKLPDD
FTGCVIAWNSNNLDSKVGGNYNYLYRLFRKSNLKPFERDISTEIYQAGSTPCNGVKGFNCYFPLQSYGFQPTYGVGYQPYRVVVL
SFELLHAPATVCGPKKSTNLVKNKCVNFNFNGLTGTGVLTESNKKFLPFQQFGRDIADTTDAVRDPQTLEILDITPCSFGGVSVIT
PGTNTSNQVAVLYQGVNCTEVPVAIHADQLTPTWRVYSTGSNVFQTRAGCLIGAEYVNNSYECDIPIGAGICASYQTQTNSPRR
ARSVASQSIIAYTMSLGAENSVAYSNNSIAIPTNFTISVTTEILPVSMTKTSVDCTMYICGDSTECSNLLLQYGSFCTQLNRALTGIA
VEQDKNTQEVFAQVKQIYKTPPIKDFGGFNFSQILPDPSKPSKRSFIEDLLFNKVTLADAGFIKQYGDCLGDIAARDLICAQKFNGL
TVLPPLLTDEMIAQYTSALLAGTITSGWTFGAGAALQIPFAMQMAYRENGIGVTQNVLYENQKLIANQFNSAIGKIQDSLSSTAS
ALGKLQDVVNQNAQALNTLVKQLSSNFGAISSVLNDILSRLDKVEAEVQIDRLITGRLQSLQTYVTQQLIRAAEIRASANLAAIKM
SECVLGQSKRVDFCGKGYHLMSFPQSAPHGVVFLHVTYVPAQEKNFTTAPAICHDGKAHFPREGVFVSNGTHWFVTQRNFYE
PQIITTDNTFVSGNCDVVIGIVNNTVYDPLQPELDSFKEELDKYFKNHTSPDVDLGDISGINASFVNIQKEIDRLNEVAKNLNESLID
LQELGKYEQYIKWPWYIWLGFIAGLIAIVMVTIMLCCMTSCCSCLKGCCSCGSCCKFDEDDSEPVLKGVKLHYT
SEQ ID NO: 22
> Severe acute respiratory syndrome coronavirus 2 isolate SARS-CoV-2/human/England/MIG457/2020, EVAg
Ref-SKU: 004V-04032, complete genome. UK B 1.1.7 lineage
ATTAAAGGTTTATACCTTCCCAGGTAACAAACCAACCAACTTTCGATCTCTTGTAGATCTGTTCTCTAAACGAACTTTAAAAT
CTGTGTGGCTGTCACTCGGCTGCATGCTTAGTGCACTCACGCAGTATAATTAATAACTAATTACTGTCGTTGACAGGACAC
GAGTAACTCGTCTATCTTCTGCAGGCTGCTTACGGTTTCGTCCGTGTTGCAGCCGATCATCAGCACATCTAGGTTTTGTCCG
GGTGTGACCGAAAGGTAAGATGGAGAGCCTTGTCCCTGGTTTCAACGAGAAAACACACGTCCAACTCAGTTTGCCTGTTTT
ACAGGTTCGCGACGTGCTCGTACGTGGCTTTGGAGACTCCGTGGAGGAGGTCTTATCAGAGGCACGTCAACATCTTAAAG
ATGGCACTTGTGGCTTAGTAGAAGTTGAAAAAGGCGTTTTGCCTCAACTTGAACAGCCCTATGTGTTCATCAAACGTTCGG
ATGCTCGAACTGCACCTCATGGTCATGTTATGGTTGAGCTGGTAGCAGAACTCGAAGGCATTCAGTACGGTCGTAGTGGT
GAGACACTTGGTGTCCTTGTCCCTCATGTGGGCGAAATACCAGTGGCTTACCGCAAGGTTCTTCTTCGTAAGAACGGTAAT
AAAGGAGCTGGTGGCCATAGTTACGGCGCCGATCTAAAGTCATTTGACTTAGGCGACGAGCTTGGCACTGATCCTTATGA
AGATTTTCAAGAAAACTGGAACACTAAACATAGCAGTGGTGTTACCCGTGAACTCATGCGTGAGCTTAACGGAGGGGCAT
ACACTCGCTATGTCGATAACAACTTCTGTGGCCCTGATGGCTACCCTCTTGAGTGCATTAAAGACCTTCTAGCACGTGCTGG
TAAAGCTTCATGCACTTTGTCTGAACAACTGGACTTTATTGACACTAAGAGGGGTGTATACTGCTGCCGTGAACATGAGCA
TGAAATTGCTTGGTACACGGAACGTTCTGAAAAGAGCTATGAATTGCAGACACCTTTTGAAATTAAATTGGCAAAGAAATT
TGACACCTTCAATGGGGAATGTCCAAATTTTGTATTTCCCTTAAATTCCATAATCAAGACTATTCAACCAAGGGTTGAAAAG
AAAAAGCTTGATGGCTTTATGGGTAGAATTCGATCTGTCTATCCAGTTGCGTCACCAAATGAATGCAACCAAATGTGCCTTT
CAACTCTCATGAAGTGTGATCATTGTGGTGAAACTTCATGGCAGACGGGCGATTTTGTTAAAGCCACTTGCGAATTTTGTG
GCACTGAGAATTTGACTAAAGAAGGTGCCACTACTTGTGGTTACTTACCCCAAAATGCTGTTGTTAAAATTTATTGTCCAGC
ATGTCACAATTCAGAAGTAGGACCTGAGCATAGTCTTGCCGAATACCATAATGAATCTGGCTTGAAAACCATTCTTCGTAA
GGGTGGTCGCACTATTGCCTTTGGAGGCTGTGTGTTCTCTTATGTTGGTTGCCATAACAAGTGTGCCTATTGGGTTCCACGT
GCTAGCGCTAACATAGGTTGTAACCATACAGGTGTTGTTGGAGAAGGTTCCGAAGGTCTTAATGACAACCTTCTTGAAATA
CTCCAAAAAGAGAAAGTCAACATCAATATTGTTGGTGACTTTAAACTTAATGÅAGAGATCGCCATTATTTTGGCATCTTTTT
CTGCTTCCACAAGTGCTTTTGTGGAÅACTGTGAAAGGTTTGGATTATAAAGCATTCAAACAAATTGTTGAATCCTGTGGTA
ATTTTAAAGTTACAAAAGGAAAAGCTAAAAAAGGTGCCTGGAATATTGGTGAACAGAAATCAATACTGAGTCCTCTTTATG
CATTTGCATCAGAGGCTGCTCGTGTTGTACGATCAATTTTCTCCCGCACTCTTGAAACTGCTCAAAATTCTGTGCGTGTTTTÅ
CAGAAGGCCGCTATAACAATACTAGATGGAATTTCACAGTATTCACTGAGACTCATTGATGCTATGATGTTCACATCTGATT
TGGCTACTAACAATCTAGTTGTAATGGCCTACATTACAGGTGGTGTTGTTCAGTTGACTTCGCAGTGGCTAACTAACATCTT
TGGCACTGTTTATGAAAAACTCAAACCCGTCCTTGATTGGCTTGAAGAGAAGTTTAAGGAAGGTGTAGAGTTTCTTAGAGA
CGGTTGGGAAATTGTTAAATTTATCTCAACCTGTGCTTGTGAAATTGTCGGTGGACAAATTGTCACCTGTGCAAAGGAAAT
TAAGGAGAGTGTTCAGACATTCTTTAAGCTTGTAAATAAATTTTTGGCTTTGTGTGCTGACTCTATCATTATTGGTGGAGCT
AAACTTAAAGCCTTGAATTTAGGTGAAACATTTGTCACGCACTCAAAGGGATTGTACAGAAAGTGTGTTAAATCCAGAGAA
GAAACTGGCCTACTCATGCCTCTAAAAGCCCCAAAAGAAATTATCTTCTTAGAGGGAGAAACACTTCCCACAGAAGTGTTA
ACAGAGGAAGTTGTCTTGAAAACTGGTGATTTACAACCATTAGAACAACCTACTAGTGAAGCTGTTGAAGCTCCATTGGTT
GGTACACCAGTTTGTATTAACGGGCTTATGTTGCTCGAAATCAAAGACACAGAAAAGTACTGTGCCCTTGCACCTAATATG
ATGGTAACAAACAATACCTTCACACTCAAAGGCGGTGCACCAACAAAGGTTACTTTTGGTGATGACACTGTGATAGAAGTG
CAAGGTTACAAGAGTGTGAATATCACTTTTGAACTTGATGAAAGGATTGATAAAGTACTTAATGAGAAGTGCTCTGCCTAT
ACAGTTGAACTCGGTACAGAAGTAAATGAGTTCGCCTGTGTTGTGGCAGATGCTGTCATAAAAACTTTGCAACCAGTATCT
GAATTACTTACACCACTGGGCATTGATTTAGATGAGTGGAGTATGGCTACATACTACTTATTTGATGAGTCTGGTGAGTTTA
AATTGGCTTCACATATGTATTGTTCTTTTTACCCTCCAGATGAGGATGAAGAAGAAGGTGATTGTGAAGAAGAAGAGTTTG
AGCCATCAACTCAATATGAGTATGGTACTGAAGATGATTACCAAGGTAAACCTTTGGAATTTGGTGCCACTTCTGCTGCTCT
TCAACCTGAAGAAGAGCAAGAAGAAGATTGGTTAGATGATGATAGTCAACAAACTGTTGGTCAACAAGACGGCAGTGAG
GACAATCAGACAACTATTATTCAAACAATTGTTGAGGTTCAACCTCAATTAGAGATGGAACTTACACCAGTTGTTCAGACTA
TTGAAGTGAATAGTTTTAGTGGTTATTTAAAACTTACTGACAATGTATACATTAAAAATGCAGACATTGTGGAAGAAGCTA
AAAAGGTAAAACCAACAGTGGTTGTTAATGCAGCCAATGTTTACCTTAAACATGGAGGAGGTGTTGCAGGAGCCTTAAAT
AAGGCTACTAACAATGCCATGCAAGTTGAATCTGATGATTACATAGCTACTAATGGACCACTTAAAGTGGGTGGTAGTTGT
GTTTTAAGCGGACACAATCTTGCTAAACACTGTCTTCATGTTGTCGGCCCAAATGTTAACAAAGGTGAAGACATTCAACTTC
TTAAGAGTGCTTATGAAAATTTTAATCAGCACGAAGTTCTACTTGCACCATTATTATCAGCTGGTATTTTTGGTGCTGACCCT
ATACATTCTTTAAGAGTTTGTGTAGATACTGTTCGCACAAATGTCTACTTAGCTGTCTTTGATAAAAATCTCTATGACAAACT
TGTTTCAAGCTTTTTGGAAATGAAGAGTGAAAAGCAAGTTGAACAAAAGATCGCTGAGATTCCTAAAGAGGAAGTTAAGC
CATTTATAACTGAAAGTAAACCTTCAGTTGAACAGAGAAAACAAGATGATAAGAAAATCAAAGCTTGTGTTGAAGAAGTT
ACAACAACTCTGGAAGAAACTAAGTTCCTCACAGAAAACTTGTTACTTTATATTGACATTAATGGCAATCTTCATCCAGATT
CTGCCACTCTTGTTAGTGACATTGACATCACTTTCTTAAAGAAAGATGCTCCATATATAGTGGGTGATGTTGTTCAAGAGGG
TGTTTTAACTGCTGTGGTTATACCTACTAAAAAGGCTGGTGGCACTACTGAAATGCTAGCGAAAGCTTTGAGAAAAGTGCC
AACAGACAATTATATAACCACTTACCCGGGTCAGGGTTTAAATGGTTACACTGTAGAGGAGGCAAAGACAGTGCTTAAAA
AGTGTAAAAGTGCCTTTTACATTCTACCATCTATTATCTCTAATGAGAAGCAAGAAATTCTTGGAACTGTTTCTTGGAATTTG
CGAGAAATGCTTGCACATGCAGAAGAAACACGCAAATTAATGCCTGTCTGTGTGGAAACTAAAGCCATAGTTTCAACTATA
CAGCGTAAATATAAGGGTATTAAAATACAAGAGGGTGTGGTTGATTATGGTGCTAGATTTTACTTTTACACCAGTAAAACA
ACTGTAGCGTCACTTATCAACACACTTAACGATCTAAATGAAACTCTTGTTACAATGCCACTTGGCTATGTAACACATGGCT
TAAATTTGGAAGAAGCTGCTCGGTATATGAGATCTCTCAAAGTGCCAGCTACAGTTTCTGTTTCTTCACCTGATGCTGTTAC
AGCGTATAATGGTTATCTTACTTCTTCTTCTAAAACACCTGAAGAACATTTTATTGAAACCATCTCACTTGCTGGTTCCTATA
AAGATTGGTCCTATTCTGGACAATCTACACAACTAGGTATAGAATTTCTTAAGAGAGGTGATAAAAGTGTATATTACACTA
GTAATCCTACCACATTCCACCTAGATGGTGAAGTTATCACCTTTGACAATCTTAAGACACTTCTTTCTTTGAGAGAAGTGAG
GACTATTAAGGTGTTTACAACAGTAGACAACATTAATCTCCACACGCAAGTTGTGGACATGTCAATGACATATGGACAACA
GTTTGGTCCAACTTATTTGGATGGAGCTGATGTTACTAAAATAAAACCTCATAATTCACATGAAGGTAAAACATTTTATGTT
TTACCTAATGATGACACTCTACGTGTTGAGGCTTTTGAGTACTACCACACAACTGATCCTAGTTTTCTGGGTAGGTACATGT
CAGCATTAAATCACACTAAAAAGTGGAAATACCCACAAGTTAATGGTTTAACTTCTATTAAATGGGCAGATAACAACTGTT
ATCTTGCCACTGCATTGTTAACACTCCAACAAATAGAGTTGAAGTTTAATCCACCTGCTCTACAAGATGCTTATTACAGAGC
AAGGGCTGGTGAAGCTGATAACTTTTGTGCACTTATCTTAGCCTACTGTAATAAGACAGTAGGTGAGTTAGGTGATGTTAG
AGAAACAATGAGTTACTTGTTTCAACATGCCAATTTAGATTCTTGCAAAAGAGTCTTGAACGTGGTGTGTAAAACTTGTGG
ACAACAGCAGACAACCCTTAAGGGTGTAGAAGCTGTTATGTACATGGGCACACTTTCTTATGAACAATTTAAGAAAGGTGT
TCAGATACCTTGTACGTGTGGTAAACAAGCTACAAAATATCTAGTACAACAGGAGTCACCTTTTGTTATGATGTCAGCACCA
CCTGCTCAGTATGAACTTAAGCATGGTACATTTACTTGTGCTAGTGAGTACACTGGTAATTACCAGTGTGGTCACTATAAAC
ATATAACTTCTAAAGAAACTTTGTATTGCATAGACGGTGCTTTACTTACAAAGTCCTCAGAATACAAAGGTCCTATTACGGA
TGTTTTCTACAAAGAAAACAGTTACACAACAACCATAAAACCAGTTACTTATAAATTGGATGGTGTTGTTTGTACAGAAATT
GACCCTAAGTTGGACAATTATTATAAGAAAGACAATTCTTATTTTACAGAGCAACCAATTGATCTTGTACCAAACCAACCAT
ATCCAAACGCAAGCTTCGATAATTTTAAGTTTGTATGTGATAATATCAAATTTGCTGATGATTTAAACCAGTTAACTGGTTA
TAAGAAACCTGCTTCAAGAGAGCTTAAAGTTACATTTTTCCCTGACTTAAATGGTGATGTGGTGGCTATTGATTATAAACAC
TACACACCCTCTTTTAAGAAAGGAGCTAAATTGTTACATAAACCTATTGTTTGGCATGTTAACAATGCAACTAATAAAGCCA
CGTATAAACCAAATACCTGGTGTATACGTTGTCTTTGGAGCACAAAACCAGTTGAAACATCAAATTCGTTTGATGTACTGAA
GTCAGAGGACGCGCAGGGAATGGATAATCTTGCCTGCGAAGATCTAAAACCAGTCTCTGAAGAAGTAGTGGAAAATCCTA
CCATACAGAAAGACGTTCTTGAGTGTAATGTGAAAACTACCGAAGTTGTAGGAGACATTATACTTAAACCAGCAAATAATA
GTTTAAAAATTACAGAAGAGGTTGGCCACACAGATCTAATGGCTGCTTATGTAGACAATTCTAGTCTTACTATTAAGAAAC
CTAATGAATTATCTAGAGTATTAGGTTTGAAAACCCTTGTTACTCATGGTTTAGCTGCTGTTAATAGTGTCCCTTGGGATAC
TATAGCTAATTATGCTAAGCCTTTTCTTAACAAAGTTGTTAGTACAACTACTAACATAGTTACACGGTGTTTAAACCGTGTTT
GTACTAATTATATGCCTTATTTCTTTACTTTATTGCTACAATTGTGTACTTTTACTAGAAGTACAAATTCTAGAATTAAAGCAT
CTATGCCGACTACTATAGCAAAGAATACTGTTAAGAGTGTCGGTAAATTTTGTCTAGAGGCTTCATTTAATTATTTGAAGTC
ACCTAATTTTTCTAAACTGATAAATATTACAATTTGGTTTTTACTATTAAGTGTTTGCCTAGGTTCTTTAATCTACTCAACCGC
TGCTTTAGGTGTTTTAATGTCTAATTTAGGCATGCCTTCTTACTGTACTGGTTACAGAGAAGGCTATTTGAACTCTACTAATG
TCACTATTGCAACCTACTGTACTGGTTCTATACCTTGTAGTGTTTGTCTTAGTGGTTTAGATTCTTTAGACACCTATCCTTCTT
TAGAAACTATACAAATTACCATTTCATCTTTTAAATGGGATTTAACTGCTTTTGGCTTAGTTGCAGAGTGGTTTTTGGCATAT
ATTCTTTTCACTAGGTTTTTCTATGTACTTGGATTGGCTGCAATCATGCAATTGTTTTTCAGCTATTTTGCAGTACATTTTATT
AGTAATTCTTGGCTTATGTGGTTAATAATTAATCTTGTACAAATGGCCCCGATTTCAGCTATGGTTAGAATGTACATCTTCTT
TGCATCATTTTATTATGTATGGAAAAGTTATGTGCATGTTGTAGACGGTTGTAATTCATCAACTTGTATGATGTGTTACAAA
CGTAATAGAGCAACAAGAGTCGAATGTACAACTATTGTTAATGGTGTTAGAAGGTCCTTTTATGTCTATGCTAATGGAGGT
AAAGGCTTTTGCAAACTACACAATTGGAATTGTGTTAATTGTGATACATTCTGTGCTGGTAGTACATTTATTAGTGATGAAG
TTGCGAGAGACTTGTCACTACAGTTTAAAAGACCAATAAATCCTACTGACCAGTCTTCTTACATCGTTGATAGTGTTACAGT
GAAGAATGGTTCCATCCATCTTTACTTTGATAAAGCTGGTCAAAAGACTTATGAAAGACATTCTCTCTCTCATTTTGTTAACT
TAGACAACCTGAGAGCTAATAACACTAAAGGTTCATTGCCTATTAATGTTATAGTTTTTGATGGTAAATCAAAATGTGAAG
AATCATCTGCAAAATCAGCGTCTGTTTACTACAGTCAGCTTATGTGTCAACCTATACTGTTACTAGATCAGGCATTAGTGTC
TGATGTTGGTGATAGTGCGGAAGTTGCAGTTAAAATGTTTGATGCTTACGTTAATACGTTTTCATCAACTTTTAACGTACCA
ATGGAAAAACTCAAAACACTAGTTGCAACTGCAGAAGCTGAACTTGCAAAGAATGTGTCCTTAGACAATGTCTTATCTACT
TTTATTTCAGCAGCTCGGCAAGGGTTTGTTGATTCAGATGTAGAAACTAAAGATGTTGTTGAATGTCTTAAATTGTCACATC
AATCTGACATAGAAGTTACTGGCGATAGTTGTAATAACTATATGCTCACCTATAACAAAGTTGAAAACATGACACCCCGTG
ACCTTGGTGCTTGTATTGACTGTAGTGCGCGTCATATTAATGCGCAGGTAGCAAAAAGTCACAACATTGCTTTGATATGGA
ACGTTAAAGATTTCATGTCATTGTCTGAACAACTACGAAAACAAATACGTAGTGCTGCTAAAAAGAATAACTTACCTTTTAA
GTTGACATGTGCAACTACTAGACAAGTTGTTAATGTTGTAACAACAAAGATAGCACTTAAGGGTGGTAAAATTGTTAATAA
TTGGTTGAAGCAGTTAATTAAAGTTACACTTGTGTTCCTTTTTGTTGCTGCTATTTTCTATTTAATAACACCTGTTCATGTCAT
GTCTAAACATACTGACTTTTCAAGTGAAATCATAGGATACAAGGCTATTGATGGTGGTGTCACTCGTGACATAGCATCTAC
AGATACTTGTTTTGCTAACAAACATGCTGATTTTGACACATGGTTTAGCCAGCGTGGTGGTAGTTATACTAATGACAAAGCT
TGCCCATTGATTGCTGCAGTCATAACAAGAGAAGTGGGTTTTGTCGTGCCTGGTTTGCCTGGCACGATATTACGCACAACT
AATGGTGACTTTTTGCATTTCTTACCTAGAGTTTTTAGTGCAGTTGGTAACATCTGTTACACACCATCAAAACTTATAGAGTA
CACTGACTTTGCAACATCAGCTTGTGTTTTGGCTGCTGAATGTACAATTTTTAAAGATGCTTCTGGTAAGCCAGTACCATAT
TGTTATGATACCAATGTACTAGAAGGTTCTGTTGCTTATGAAAGTTTACGCCCTGACACACGTTATGTGCTCATGGATGGCT
CTATTATTCAATTTCCTAACACCTACCTTGAAGGTTCTGTTAGAGTGGTAACAACTTTTGATTCTGAGTACTGTAGGCACGG
CACTTGTGAAAGATCAGAAGCTGGTGTTTGTGTATCTACTAGTGGTAGATGGGTACTTAACAATGATTATTACAGATCTTTA
CCAGGAGTTTTCTGTGGTGTAGATGCTGTAAATTTACTTACTAATATGTTTACACCACTAATTCAACCTATTGGTGCTTTGGA
CATATCAGCATCTATAGTAGCTGGTGGTATTGTAGCTATCGTAGTAACATGCCTTGCCTACTATTTTATGAGGTTTAGAAGA
GCTTTTGGTGAATACAGTCATGTAGTTGCCTTTAATACTTTACTATTCCTTATGTCATTCACTGTACTCTGTTTAACACCAGTT
TACTCATTCTTACCTGGTGTTTATTCTGTTATTTACTTGTACTTGACATTTTATCTTACTAATGATGTTTCTTTTTTAGCACATA
TTCAGTGGATGGTTATGTTCACACCTTTAGTACCTTTCTGGATAACAATTGCTTATATCATTTGTATTTCCACAAAGCATTTCT
ATTGGTTCTTTAGTAATTACCTAAAGAGACGTGTAGTCTTTAATGGTGTTTCCTTTAGTACTTTTGAAGAAGCTGCGCTGTG
CACCTTTTTGTTAAATAAAGAAATGTATCTAAAGTTGCGTAGTGATGTGCTATTACCTCTTACGCAATATAATAGATACTTA
GCTCTTTATAATAAGTACAAGTATTTTAGTGGAGCAATGGATACAACTAGCTACAGAGAAGCTGCTTGTTGTCATCTCGCA
AAGGCTCTCAATGACTTCAGTAACTCAGGTTCTGATGTTCTTTACCAACCACCACAAACCTCTATCACCTCAGCTGTTTTGCA
GAGTGGTTTTAGAAAAATGGCATTCCCATCTGGTAAAGTTGAGGGTTGTATGGTACAAGTAACTTGTGGTACAACTACACT
TAACGGTCTTTGGCTTGATGACGTAGTTTACTGTCCAAGACATGTGATCTGCACCTCTGAAGACATGCTTAACCCTAATTAT
GAAGATTTACTCATTCGTAAGTCTAATCATAATTTCTTGGTACAGGCTGGTAATGTTCAACTCAGGGTTATTGGACATTCTA
TGCAAAATTGTGTACTTAAGCTTAAGGTTGATACAGCCAATCCTAAGACACCTAAGTATAAGTTTGTTCGCATTCAACCAGG
ACAGACTTTTTCAGTGTTAGCTTGTTACAATGGTTCACCATCTGGTGTTTACCAATGTGCTATGAGGCCCAATTTCACTATTA
AGGGTTCATTCCTTAATGGTTCATGTGGTAGTGTTGGTTTTAACATAGATTATGACTGTGTCTCTTTTTGTTACATGCACCAT
ATGGAATTACCAACTGGAGTTCATGCTGGCACAGACTTAGAAGGTAACTTTTATGGACCTTTTGTTGACAGGCAAACAGCA
CAAGCAGCTGGTACGGACACAACTATTACAGTTAATGTTTTAGCTTGGTTGTACGCTGCTGTTATAAATGGAGACAGGTGG
TTTCTCAATCGATTTACCACAACTCTTAATGACTTTAACCTTGTGGCTATGAAGTACAATTATGAACCTCTAACACAAGACCA
TGTTGACATACTAGGACCTCTTTCTGCTCAAACTGGAATTGCCGTTTTAGATATGTGTGCTTCATTAAAAGAATTACTGCAA
AATGGTATGAATGGACGTACCATATTGGGTAGTGCTTTATTAGAAGATGAATTTACACCTTTTGATGTTGTTAGACAATGCT
CAGGTGTTACTTTCCAAAGTGCAGTGAAAAGAACAATCAAGGGTACACACCACTGGTTGTTACTCACAATTTTGACTTCACT
TTTAGTTTTAGTCCAGAGTACTCAATGGTCTTTGTTCTTTTTTTTGTATGAAAATGCCTTTTTACCTTTTGCTATGGGTATTAT
TGCTATGTCTGCTTTTGCAATGATGTTTGTCAAACATAAGCATGCATTTCTCTGTTTGTTTTTGTTACCTTCTCTTGCCACTGT
AGCTTATTTTAATATGGTCTATATGCCTGCTAGTTGGGTGATGCGTATTATGACATGGTTGGATATGGTTGATACTAGTTTG
AAGCTAAAAGACTGTGTTATGTATGCATCAGCTGTAGTGTTACTAATCCTTATGACAGCAAGAACTGTGTATGATGATGGT
GCTAGGAGAGTGTGGACACTTATGAATGTCTTGACACTCGTTTATAAAGTTTATTATGGTAATGCTTTAGATCAAGCCATTT
CCATGTGGGCTCTTATAATCTCTGTTACTTCTAACTACTCAGGTGTAGTTACAACTGTCATGTTTTTGGCCAGAGGTATTGTT
TTTATGTGTGTTGAGTATTGCCCTATTTTCTTCATAACTGGTAATACACTTCAGTGTATAATGCTAGTTTATTGTTTCTTAGGC
TATTTTTGTACTTGTTACTTTGGCCTCTTTTGTTTACTCAACCGCTACTTTAGACTGACTCTTGGTGTTTATGATTACTTAGTTT
CTACACAGGAGTTTAGATATATGAATTCACAGGGACTACTCCCACCCAAGAATAGCATAGATGCCTTCAAACTCAACATTA
AATTGTTGGGTGTTGGTGGCAAACCTTGTATCAAAGTAGCCACTGTACAGTCTAAAATGTCAGATGTAAAGTGCACATCAR
TAGTCTTACTCTCAGTTTTGCAACAACTCAGAGTAGAATCATCATCTAAATTGTGGGCTCAATGTGTCCAGTTACACAATGA
CATTCTCTTAGCTAAAGATACTACTGAAGCCTTTGAAAAAATGGTTTCACTACTTTCTGTTTTGCTTTCCATGCAGGGTGCTG
TAGACATAAACAAGCTTTGTGAAGAAATGCTGGACAACAGGGCAACCTTACAAGCTATAGCCTCAGAGTTTAGTTCCCTTC
CATCATATGCAGCTTTTGCTACTGCTCAAGAAGCTTATGAGCAGGCTGTTGCTAATGGTGATTCTGAAGTTGTTCTTAAAAA
GTTGAAGAAGTCTTTGAATGTGGCTAAATCTGAATTTGACCGTGATGCAGCCATGCAACGTAAGTTGGAAAAGATGGCTG
ATCAAGCTATGACCCAAATGTATAAACAGGCTAGATCTGAGGACAAGAGGGCAAAAGTTACTAGTGCTATGCAGACAATG
CTTTTCACTATGCTTAGAAAGTTGGATAATGATGCACTCAACAACATTATCAACAATGCAAGAGATGGTTGTGTTCCCTTGA
ACATAATACCTCTTACAACAGCAGCCAAACTAATGGTTGTCATACCAGACTATAACACATATAAAAATACGTGTGATGGTA
CAACATTTACTTATGCATCAGCATTGTGGGAAATCCAACAGGTTGTAGATGCAGATAGTAAAATTGTTCAACTTAGTGAAA
TTAGTATGGACAATTCACCTAATTTAGCATGGCCTCTTATTGTAACAGCTTTAAGGGCCAATTCTGCTGTCAAATTACAGAA
TAATGAGCTTAGTCCTGTTGCACTACGACAGATGTCTTGTGCTGCCGGTACTACACAAACTGCTTGCACTGATGACAATGC
GTTAGCTTACTACAACACAACAAAGGGAGGTAGGTTTGTACTTGCACTGTTATCCGATTTACAGGATTTGAAATGGGCTAG
ATTCCCTAAGAGTGATGGAACTGGTACTATCTATACAGAACTGGAACCACCTTGTAGGTTTGTTACAGACACACCTAAAGG
TCCTAAAGTGAAGTATTTATACTTTATTAAAGGATTAAACAACCTAAATAGAGGTATGGTACTTGGTAGTTTAGCTGCCACA
GTACGTCTACAAGCTGGTAATGCAACAGAAGTGCCTGCCAATTCAACTGTATTATCTTTCTGTGCTTTTGCTGTAGATGCTG
CTAAAGCTTACAAAGATTATCTAGCTAGTGGGGGACAACCAATCACTAATTGTGTTAAGATGTTGTGTACACACACTGGTA
CTGGTCAGGCAATAACAGTTACACCGGAAGCCAATATGGATCAAGAATCCTTTGGTGGTGCATCGTGTTGTCTGTACTGCC
GTTGCCACATAGATCATCCAAATCCTAAAGGATTTTGTGACTTAAAAGGTAAGTATGTACAAATACCTACAACTTGTGCTAA
TGACCCTGTGGGTTTTACACTTAAAAACACAGTCTGTACCGTCTGCGGTATGTGGAAAGGTTATGGCTGTAGTTGTGATCA
ACTCCGCGAACCCATGCTTCAGTCAGCTGATGCACAATCGTTTTTAAACGGGTTTGCGGTGTAAGTGCAGCCCGTCTTACA
CCGTGCGGCACAGGCACTAGTACTGATGTCGTATACAGGGCTTTTGACATCTACAATGATAAAGTAGCTGGTTTTGCTAAA
TTCCTAAAAACTAATTGTTGTCGCTTCCAAGAAAAGGACGAAGATGACAATTTAATTGATTCTTACTTTGTAGTTAAGAGAC
ACACTTTCTCTAACTACCAACATGAAGAAACAATTTATAATTTACTTAAGGATTGTCCAGCTGTTGCTAAACATGACTTCTTT
AAGTTTAGAATAGACGGTGACATGGTACCACATATATCACGTCAACGTCTTACTAAATACACAATGGCAGACCTCGTCTAT
GCTTTAAGGCATTTTGATGAAGGTAATTGTGACACATTAAAAGAAATACTTGTCACATACAATTGTTGTGATGATGATTATT
TCAATAAAAAGGACTGGTATGATTTTGTAGAAAACCCAGATATATTACGCGTATACGCCAACTTAGGTGAACGTGTACGCC
AAGCTTTGTTAAAAACAGTACAATTCTGTGATGCCATGCGAAATGCTGGTATTGTTGGTGTACTGACATTAGATAATCAAG
ATCTCAATGGTAACTGGTATGATTTCGGTGATTTCATACAAACCACGCCAGGTAGTGGAGTTCCTGTTGTAGATTCTTATTA
TTCATTGTTAATGCCTATATTAACCTTGACCAGGGCTTTAACTGCAGAGTCACATGTTGACACTGACTTAACAAAGCCTTAC
ATTAAGTGGGATTTGTTAAAATATGACTTCACGGAAGAGAGGTTAAAACTCTTTGACCGTTATTTTAAATATTGGGATCAG
ACATACCACCCAAATTGTGTTAACTGTTTGGATGACAGATGCATTCTGCATTGTGCAAACTTTAATGTTTTATTCTCTACAGT
GTTCCCACTTACAAGTTTTGGACCACTAGTGAGAAAAATATTTGTTGATGGTGTTCCATTTGTAGTTTCAACTGGATACCAC
TTCAGAGAGCTAGGTGTTGTACATAATCAGGATGTAAACTTACATAGCTCTAGACTTAGTTTTAAGGAATTACTTGTGTATG
CTGCTGACCCTGCTATGCACGCTGCTTCTGGTAATCTATTACTAGATAAACGCACTACGTGCTTTTCAGTAGCTGCACTTACT
AACAATGTTGCTTTTCAAACTGTCAAACCTGGTAATTTTAACAAAGACTTCTATGACTTTGCTGTGTCTAAGGGTTTCTTTAA
GGAAGGAAGTTCTGTTGAATTAAAACACTTCTTCTTTGCTCAGGATGGTAATGCTGCTATCAGCGATTATGACTACTATCGT
TATAATCTACCAACAATGTGTGATATCAGACAACTACTATTTGTAGTTGAAGTTGTTGATAAGTACTTTGATTGTTACGATG
GTGGCTGTATTAATGCTAACCAAGTCATCGTCAACAACCTAGACAAATCAGCTGGTTTTCCATTTAATAAATGGGGTAAGG
CTAGACTTTATTATGATTCAATGAGTTATGAGGATCAAGATGCACTTTTCGCATATACAAAACGTAATGTCATCCCTACTAT
AACTCAAATGAATCTTAAGTATGCCATTAGTGCAAAGAATAGAGCTCGCACCGTAGCTGGTGTCTCTATCTGTAGTACTAT
GACCAATAGACAGTTTCATCAAAAATTATTGAAATCAATAGCCGCCACTAGAGGAGCTACTGTAGTAATTGGAACAAGCAA
ATTCTATGGTGGTTGGCACAACATGTTAAAAACTGTTTATAGTGATGTAGAAAACCCTCATCTTATGGGTTGGGATTATCCT
AAATGTGATAGAGCCATGCCTAACATGCTTAGAATTATGGCCTCACTTGTTCTTGCTCGCAAACATACAACGTGTTGTAGCT
TGTCACACCGTTTCTATAGATTAGCTAATGAGTGTGCTCAAGTATTGAGTGAAATGGTCATGTGTGGCGGTTCACTATATGT
TAAACCAGGTGGAACCTCATCAGGAGATGCCACAACTGCTTATGCTAATAGTGTTTTTAACATTTGTCAAGCTGTCACGGC
CAATGTTAATGCACTTTTATCTACTGATGGTAACAAAATTGCCGATAAGTATGTCCGCAATTTACAACACAGACTTTATGAG
TGTCTCTATAGAAATAGAGATGTTGACACAGACTTTGTGAATGAGTTTTACGCATATTTGCGTAAACATTTCTCAATGATGA
TACTCTCTGACGATGCTGTTGTGTGTTTCAATAGCACTTATGCATCTCAAGGTCTAGTGGCTAGCATAAAGAACTTTAAGTC
AGTTCTTTATTATCAAAACAATGTTTTTATGTCTGAAGCAAAATGTTGGACTGAGACTGACCTTACTAAAGGACCTCATGAA
TTTTGCTCTCAACATACAATGCTAGTTAAACAGGGTGATGATTATGTGTACCTTCCTTACCCAGATCCATCAAGAATCCTAG
GGGCCGGCTGTTTTGTAGATGATATCGTAAAAACAGATGGTACACTTATGATTGAACGGTTCGTGTCTTTAGCTATAGATG
CTTACCCACTTACTAAACATCCTAATCAGGAGTATGCTGATGTCTTTCATTTGTACTTACAATACATAAGAAAGCTACATGAT
GAGTTAACAGGACACATGTTAGACATGTATTCTGTTATGCTTACTAATGATAACACCTCAAGGTATTGGGAACCTGAGTTTT
ATGAGGCTATGTACACACCGCATACAGTCTTACAGGCTGTTGGGGCTTGTGTTCTTTGCAATTCACAGACTTCATTAAGATG
TGGTGCTTGCATACGTAGACCATTCTTATGTTGTAAATGCTGTTACGACCATGTCATATCAACATCACATAAATTAGTCTTGT
CTGTTAATCCGTATGTTTGCAATGCTCCAGGTTGTGATGTCACAGATGTGACTCAACTTTACTTAGGAGGTATGAGCTATTA
TTGTAAATCACATAAACCACCCATTAGTTTTCCATTGTGTGCTAATGGACAAGTTTTTGGTTTATATAAAAATACATGTGTTG
GTAGCGATAATGTTACTGACTTTAATGCAATTGCAACATGTGACTGGACAAATGCTGGTGATTACATTTTAGCTAACACCTG
TACTGAAAGACTCAAGCTTTTTGCAGCAGAAACGCTCAAAGCTACTGAGGAGACATTTAAACTGTCTTATGGTATTGCTAC
TGTACGTGAAGTGCTGTCTGACAGAGAATTACATCTTTCATGGGAAGTTGGTAAACCTAGACCACCACTTAACCGAAATTA
TGTCTTTACTGGTTATCGTGTAACTAAAAACAGTAAAGTACAAATAGGAGAGTACACCTTTGAAAAAGGTGACTATGGTGA
TGCTGTTGTTTACCGAGGTACAACAACTTACAAATTAAATGTTGGTGATTATTTTGTGCTGACATCACATACAGTAATGCCA
TTAAGTGCACCTACACTAGTGCCACAAGAGCACTATGTTAGAATTACTGGCTTATACCCAACACTCAATATCTCAGATGAG
TTTTCTAGCAATGTTGCAAATTATCAAAAGGTTGGTATGCAAAAGTATTCTACACTCCAGGGACCACCTGGTACTGGTAAG
AGTCATTTTGCTATTGGCCTAGCTCTCTACTACCCTTCTGCTCGCATAGTGTATACAGCTTGCTCTCATGCCGCTGTTGATGC
ACTATGTGAGAAGGCATTAAAATATTTGCCTATAGATAAATGTAGTAGAATTATACCTGCACGTGCTCGTGTAGAGTGTTT
TGATAAATTCAAAGTGAATTCAACATTAGAACAGTATGTCTTTTGTACTGTAAATGCATTGCCTGAGACGACAGCAGATAT
AGTTGTCTTTGATGAAATTTCAATGGCCACAAATTATGATTTGAGTGTTGTCAATGCCAGATTACGTGCTAAGCACTATGTG
TACATTGGCGACCCTGCTCAATTACCTGCACCACGCACATTGCTAACTAAGGGCACACTAGAACCAGAATATTTCAATTCAG
TGTGTAGACTTATGAAAACTATAGGTCCAGACATGTTCCTCGGAACTTGTCGGCGTTGTCCTGCTGAAATTGTTGACACTGT
GAGTGCTTTGGTTTATGATAATAGGCTTAAAGCACATAAAGACAAATCAGCTCAATGCTTTAAAATGTTTTATAAGGGTGT
TATCACGCATGATGTTTCATCTGCAATTAACAGGCCACAAATAGGCGTGGTAAGAGAATTCCTTACACGTAACCCTGCTTG
GAGAAAAGCTGTCTTTATTTCACCTTATAATTCACAGAATGCTGTAGCCTCAAAGATTTTGGGACTACCAACTCAAACTGTT
GATTCATCACAGGGCTCAGAATATGACTATGTCATATTCACTCAAACCACTGAAACAGCTCACTCTTGTAATGTAAACAGAT
TTAATGTTGCTATTACCAGAGCAAAAGTAGGCATACTTTGCATAATGTCTGATAGAGACCTTTATGACAAGTTGCAATTTAC
AAGTCTTGAAATTCCACGTAGGAATGTGGCAACTTTACAAGCTGAAAATGTAACAGGACTCTTTAAAGATTGTAGTAAGGT
AATCACTGGGTTACATCCTACACAGGCACCTACACACCTCAGTGTTGACACTAAATTCAAAACTGAAGGTTTATGTGTTGAC
ATACCTGGCATACCTAAGGACATGACCTATAGAAGACTCATCTCTATGATGGGTTTTAAAATGAATTATCAAGTTAATGGTT
ACCCTAACATGTTTATCACCCGCGAAGAAGCTATAAGACATGTACGTGCATGGATTGGCTTCGATGTCGAGGGGTGTCATG
CTACTAGAGAAGCTGTTGGTACCAATTTACCTTTACAGCTAGGTTTTTCTACAGGTGTTAACCTAGTTGCTGTACCTACAGG
TTATGTTGATACACCTAATAATACAGATTTTTCCAGAGTTAGTGCTAAACCACCGCCTGGAGATCAATTTAAACACCTCATA
CCACTTATGTACAAAGGACTTCCTTGGAATGTAGTGCGTATAAAGATTGTACAAATGTTAAGTGACACACTTAAAAATCTCT
CTGACAGAGTCGTATTTGTCTTATGGGCACATGGCTTTGAGTTGACATCTATGAAGTATTTTGTGAAAATAGGACCTGAGC
GCACCTGTTGTCTATGTGATAGACGTGCCACATGCTTTTCCACTGCTTCAGACACTTATGCCTGTTGGCATCATTCTATTGGA
TTTGATTACGTCTATAATCCGTTTATGATTGATGTTCAACAATGGGGTTTTACAGGTAACCTACAAAGCAACCATGATCTGT
ATTGTCAAGTCCATGGTAATGCACATGTAGCTAGTTGTGATGCAATCATGACTAGGTGTCTAGCTGTCCACGAGTGCTTTG
TTAAGCGTGTTGACTGGACTATTGAATATCCTATAATTGGTGATGAACTGAAGATTAATGCGGCTTGTAGAAAGGTTCAAC
ACATGGTTGTTAAAGCTGCATTATTAGCAGACAAATTCCCAGTTCTTCACGACATTGGTAACCCTAAAGCTATTAAGTGTGT
ACCTCAAGCTGATGTAGGATGGAAGTTCTATGATGCACAGCCTTGTAGTGACAAAGCTTATAAAATAGAAGAATTATTCTA
TTCTTATGCCACACATTCTGACAAATTCACAGATGGTGTATGCCTATTTTGGAATTGCAATGTCGATAGATATCCTGCTAATT
CCATTGTTTGTAGATTTGACACTAGAGTGCTATCTAACCTTAACTTGCCTGGTTGTGATGGTGGCAGTTTGTATGTAAATAA
ACATGCATTCCACACACCAGCTTTTGATAAAAGTGCTTTTGTTAATTTAAAACAATTACCATTTTTCTATTACTCTGACAGTCC
ATGTGAGTCTCATGGAAAACAAGTAGTGTCAGATATAGATTATGTACCACTAAAGTCTGCTACGTGTATAACACGTTGCAA
TTTAGGTGGTGCTGTCTGTAGACATCATGCTAATGAGTACAGATTGTATCTCGATGCTTATAACATGATGATCTCAGCTGGC
TTTAGCTTGTGGGTTTACAAACAATTTGATACTTATAACCTCTGGAACACTTTTACAAGACTTCAGAGTTTAGAAAATGTGG
CTTTTAATGTTGTAAATAAGGGACACTTTGATGGACAACAGGGTGAAGTACCAGTTTCTATCATTAATAACACTGTTTACAC
AAAAGTTGATGGTGTTGATGTAGAATTGTTTGAAAATAAAACAACATTACCTGTTAATGTAGCATTTGAGCTTTGGGCTAA
GCGCAACATTAAACCAGTACCAGAGGTGAAAATACTCAATAATTTGGGTGTGGATATTGCTGCTAATACTGTGATCTGGGA
CTACAAAAGAGATGCTCCAGCACATATATCTACTATTGGTGTTTGTTCTATGACTGACATAGCCAAGAAACCAACTGAAAC
GÅTTTGTGCACCACTCACTGTCTTTTTTGATGGTAGAGTTGATGGTCAAGTAGACTTATTTAGAAATGCCCGTAATGGTGTT
CTTATTACAGAAGGTAGTGTTAAAGGTTTACAACCATCTGTAGGTCCCAAACAAGCTAGTCTTAATGGAGTCACATTAATT
GGAGAAGCCGTAAAAACACAGTTCAATTATTATAAGAAAGTTGATGGTGTTGTCCAACAATTACCTGAAACTTACTTTACTC
AGAGTAGAAATTTACAAGAATTTAAACCCAGGAGTCAAATGGAAATTGATTTCTTAGAATTAGCTATGGATGAATTCATTG
AACGGTATAAATTAGAAGGCTATGCCTTCGAACATATCGTTTATGGAGATTTTAGTCATAGTCAGTTAGGTGGTTTACATCT
ACTGATTGGACTAGCTAAACGTTTTAAGGAATCACCTTTTGAATTAGAAGATTTTATTCCTATGGACAGTACAGTTAAAAAC
TATTTCATAACAGATGCGCAAACAGGTTCATCTAAGTGTGTGTGTTCTGTTATTGATTTATTACTTGATGATTTTGTTGAAAT
AATAAAATCCCAAGATTTATCTGTAGTTTCTAAGGTTGTCAAAGTGACTATTGACTATACAGAAATTTCATTTATGCTTTGTG
TAAAGATGGCCATGTAGAAACATTTTACCCAAAATTACAATCTAGTCAAGCGTGGCAACCGGGTGTTGCTATGCCTAATCT
TTACAAAATGCAAAGAATGCTATTAGAAAAGTGTGACCTTCAAAATTATGGTGATAGTGCAACATTACCTAAAGGCATAAT
GATGAATGTCGCAAAATATACTCAACTGTGTCAATATTTAAACACATTAACATTAGCTGTACCCTATAATATGAGAGTTATA
CATTTTGGTGCTGGTTCTGATAAAGGAGTTGCACCAGGTACAGCTGTTTTAAGACAGTGGTTGCCTACGGGTACGCTGCTT
GTCGATTCAGATCTTAATGACTTTGTCTCTGATGCAGATTCAACTTTGATTGGTGATTGTGCAACTGTACATACAGCTAATA
AATGGGATCTCATTATTAGTGATATGTACGACCCTAAGACTAAAAATGTTACAAAAGAAAATGACTCTAAAGAGGGTTTTT
TCACTTACATTTGTGGGTTTATACAACAAAAGCTAGCTCTTGGAGGTTCCGTGGCTATAAAGATAACAGAACATTCTTGGA
ATGCTGATCTTTATAAGCTCATGGGACACTTCGCATGGTGGACAGCCTTTGTTACTAATGTGAATGCGTCATCATCTGAAGC
ATTTTTAATTGGATGTAATTATCTTGGCAAACCACGCGAACAAATAGATGGTTATGTCATGCATGCAAATTACATATTTTGG
AGGAATACAAATCCAATTCAGTTGTCTTCCTATTCTTTATTTGACATGAGTAAATTTCCCCTTAAATTAAGGGGTACTGCTGT
TATGTCTTTAAAAGAAGGTCAAATCAATGATATGATTTTATCTCTTCTTAGTAAAGGTAGACTTATAATTAGAGAAAACAAC
AGAGTTGTTATTTCTAGTGATGTTCTTGTTAACAACTAAACGAACAATGTTTGTTTTTCTTGTTTTATTGCCACTAGTCTCTAG
TCAGTGTGTTAATCTTACAACCAGAACTCAATTACCCCCTGCATACACTAATTCTTTCACACGTGGTGTTTATTACCCTGACA
AAGTTTTCAGATCCTCAGTTTTACATTCAACTCAGGACTTGTTCTTACCTTTCTTTTCCAATGTTACTTGGTTCCATGCTATCT
CTGGGACCAATGGTACTAAGAGGTTTGATAACCCTGTCCTACCATTTAATGATGGTGTTTATTTTGCTTCCACTGAGAAGTC
TAACATAATAAGAGGCTGGATTTTTGGTACTACTTTAGATTCGAAGACCCAGTCCCTACTTATTGTTAATAACGCTACTAAT
GTTGTTATTAAAGTCTGTGAATTTCAATTTTGTAATGATCCATTTTTGGGTGTTTACCACAAAAACAACAAAAGTTGGATGG
AAAGTGAGTTCAGAGTTTATTCTAGTGCGAATAATTGCACTTTTGAATATGTCTCTCAGCCTTTTCTTATGGACCTTGAAGG
AAAACAGGGTAATTTCAAAAATCTTAGGGAATTTGTGTTTAAGAATATTGATGGTTATTTTAAAATATATTCTAAGCACACG
CCTATTAATTTAGTGCGTGATCTCCCTCAGGGTTTTTCGGCTTTAGAACCATTGGTAGATTTGCCAATAGGTATTAACATCAC
TAGGTTTCAAACTTTACTTGCTTTACATAGAAGTTATTTGACTCCTGGTGATTCTTCTTCAGGTTGGACAGCTGGTGCTGCA
GCTTATTATGTGGGTTATCTTCAACCTAGGACTTTTCTATTAAAATATAATGAAAATGGAACCATTACAGATGCTGTAGACT
GTGCACTTGACCCTCTCTCAGAAACAAAGTGTACGTTGAAATCCTTCACTGTAGAAAAAGGAATCTATCAAACTTCTAACTT
TAGAGTCCAACCAACAGAATCTATTGTTAGATTTCCTAATATTACAAACTTGTGCCCTTTTGGTGAAGTTTTTAACGCCACCA
GATTTGCATCTGTTTATGCTTGGAACAGGAAGAGAATCAGCAACTGTGTTGCTGATTATTCTGTCCTATATAATTCCGCATC
ATTTTCCACTTTTAAGTGTTATGGAGTGTCTCCTACTAAATTAAATGATCTCTGCTTTACTAATGTCTATGCAGATTCATTTGT
AATTAGAGGTGATGAAGTCAGACAAATCGCTCCAGGGCAAACTGGAAAGATTGCTGATTATAATTATAAATTACCAGATG
ATTTTACAGGCTGCGTTATAGCTTGGAATTCTAACAATCTTGATTCTAAGGTTGGTGGTAATTATAATTACCTGTATAGATT
GTTTAGGAAGTCTAATCTCAAACCTTTTGAGAGAGATATTTCAACTGAAATCTATCAGGCCGGTAGCACACCTTGTAATGG
TGTTGAAGGTTTTAATTGTTACTTTCCTTTACAATCATATGGTTTCCAACCCACTTATGGTGTTGGTTACCAACCATACAGAG
TAGTAGTACTTTCTTTTGAACTTCTACATGCACCAGCAACTGTTTGTGGACCTAAAAAGTCTACTAATTTGGTTAAAAACAA
ATGTGTCAATTTCAACTTCAATGGTTTAACAGGCACAGGTGTTCTTACTGAGTCTAACAAAAAGTTTCTGCCTTTCCAACAA
TTTGGCAGAGACATTGATGACACTACTGATGCTGTCCGTGATCCACAGACACTTGAGATTCTTGACATTACACCATGTTCTT
TTGGTGGTGTCAGTGTTATAACACCAGGAACAAATACTTCTAACCAGGTTGCTGTTCTTTATCAGGGTGTTAACTGCACAG
AAGTCCCTGTTGCTATTCATGCAGATCAACTTACTCCTACTTGGCGTGTTTATTCTACAGGTTCTAATGTTTTTCAAACACGT
GCAGGCTGTTTAATAGGGGCTGAACATGTCAACAACTCATATGAGTGTGACATACCCATTGGTGCAGGTATATGCGCTAGT
TATCAGACTCAGACTAATTCTCATCGGGGGGCACGTAGTGTAGCTAGTCAATCCATCATTGCCTACACTATGTCACTTGGTG
CAGAAAATTCAGTTGCTTACTCTAATAACTCTATTGCCATACCCATAAATTTTACTATTAGTGTTACCACAGAAATTCTACCA
GTGTCTATGACCAAGACATCAGTAGATTGTACAATGTACATTTGTGGTGATTCAACTGAATGCAGCAATCTTTTGTTGCAAT
ATGGCAGTTTTTGTACACAATTAAACCGTGCTTTAACTGGAATAGCTGTTGAACAAGACAAAAACACCCAAGAAGTTTTTG
CACAAGTCAAACAAATTTACAAAACACCACCAATTAAAGATTTTGGTGGTTTTAATTTTTCACAAATATTACCAGATCCATCA
AAACCAAGCAAGAGGTCATTTATTGAAGATCTACTTTTCAACAAAGTGACACTTGCAGATGCTGGCTTCATCAAACAATAT
GGTGATTGCCTTGGTGATATTGCTGCTAGAGACCTCATTTGTGCACAAAAGTTTAACGGCCTTACTGTTTTGCCACCTTTGC
TCACAGATGAAATGATTGCTCAATACACTTCTGCACTGTTAGCGGGTACAATCACTTCTGGTTGGACCTTTGGTGCAGGTG
CTGCATTACAAATACCATTTGCTATGCAAATGGCTTATAGGTTTAATGGTATTGGAGTTACACAGAATGTTCTCTATGAGAA
CCAAAAATTGATTGCCAACCAATTTAATAGTGCTATTGGCAAAATTCAAGACTCACTTTCTTCCACAGCAAGTGCACTTGGA
AAACTTCAAGATGTGGTCAACCAAAATGCACAAGCTTTAAACACGCTTGTTAAACAACTTAGCTCCAATTTTGGTGCAATTT
CAAGTGTTTTAAATGATATCCTTGCACGTCTTGACAAAGTTGAGGCTGAAGTGCAAATTGATAGGTTGATCACAGGCAGAC
TTCAAAGTTTGCAGACATATGTGACTCAACAATTAATTAGAGCTGCAGAAATCAGAGCTTCTGCTAATCTTGCTGCTACTAA
AATGTCAGAGTGTGTACTTGGACAATCAAAAAGAGTTGATTTTTGTGGAAAGGGCTATCATCTTATGTCCTTCCCTCAGTCA
GCACCTCATGGTGTAGTCTTCTTGCATGTGACTTATGTCCCTGCACAAGAAAAGAACTTCACAACTGCTCCTGCCATTTGTC
ATGATGGAAAAGCACACTTTCCTCGTGAAGGTGTCTTTGTTTCAAATGGCACACACTGGTTTGTAACACAAAGGAATTTTTA
TGAACCACAAATCATTACTACACACAACACATTTGTGTCTGGTAACTGTGATGTTGTAATAGGAATTGTCAACAACACAGTT
TATGATCCTTTGCAACCTGAATTAGACTCATTCAAGGAGGAGTTAGATAAATATTTTAAGAATCATACATCACCAGATGTTG
ATTTAGGTGACATCTCTGGCATTAATGCTTCAGTTGTAAACATTCAAAAAGAAATTGACCGCCTCAATGAGGTTGCCAAGA
ATTTAAATGAATCTCTCATCGATCTCCAAGAACTTGGAAAGTATGAGCAGTATATAAAATGGCCATGGTACATTTGGCTAG
GTTTTATAGCTGGCTTGATTGCCATAGTAATGGTGACAATTATGCTTTGCTGTATGACCAGTTGCTGTAGTTGTCTCAAGGG
CTGTTGTTCTTGTGGATCCTGCTGCAAATTTGATGAAGACGACTCTGAGCCAGTGCTCAAAGGAGTCAAATTACATTACAC
ATAAACGAACTTATGGATTTGTTTATGAGAATCTTCACAATTGGAACTGTAACTTTGAAGCAAGGTGAAATCAAGGATGCT
ACTCCTTCAGATTTTGTTCGCGCTACTGCAACGATACCGATACAAGCCTCACTCCCTTTCGGATGGCTTATTGTTGGCGTTGC
ACTTCTTGCTGTTTTTCAGAGCGCTTCCAAAATCATAACCCTCAAAAAGAGATGGCAACTAGCACTCTCCAAGGGTGTTCAC
TTTGTTTGCAACTTGCTGTTGTTGTTTGTAACAGTTTACTCACACCTTTTGCTCGTTGCTGCTGGCCTTGAAGCCCCTTTTCTC
TATCTTTATGCTTTAGTCTACTTCTTGCAGAGTATAAACTTTGTAAGAATAATAATGAGGCTTTGGCTTTGCTGGAAATGCC
GTTCCAAAAACCCATTACTTTATGATGCCAACTATTTTCTTTGCTGGCATACTAATTGTTACGACTATTGTATACCTTACAATA
GTGTAACTTCTTCAATTGTCATTACTTCAGGTGATGGCACAACAAGTCCTATTTCTGAACATGACTACCAGATTGGTGGTTA
TACTGAAAAATGGGAATCTGGAGTAAAAGACTGTGTTGTATTACACAGTTACTTCACTTCAGACTATTACCAGCTGTACTCA
ACTCAATTGAGTACAGACACTGGTGTTGAACATGTTACCTTCTTCATCTACAATAAAATTGTTGATGAGCCTGAAGAACATG
TCCAAATTCACACAATCGACGGTTCATCCGGAGTTGTTAATCCAGTAATGGAACCAATTTATGATGAACCGACGACGACTA
CTAGCGTGCCTTTGTAAGCACAAGCTGATGAGTACGAACTTATGTACTCATTCGTTTCGGAAGAGACAGGTACGTTAATAG
TTAATAGCGTACTTCTTTTTCTTGCTTTCGTGGTATTCTTGCTAGTTACACTAGCCATCCTTACTGCGCTTCGATTGTGTGCGT
ACTGCTGCAATATTGTTAACGTGAGTCTTGTAAAACCTTCTTTTTACGTTTACTCTCGTGTTAAAAATCTGAATTCTTCTAGA
GTTCCTGATCTTCTGGTCTAAACGAACTAAATATTATATTAGTTTTTCTGTTTGGAACTTTAATTTTAGCCATGGCAGATTCC
AACGGTACTATTACCGTTGAAGAGCTTAAAAAGCTCCTTGAACAATGGAACCTAGTAATAGGTTTCCTATTCCTTACATGGA
TTTGTCTTCTACAATTTGCCTATGCCAACAGGAATAGGTTTTTGTATATAATTAAGTTAATTTTCCTCTGGCTGTTATGGCCA
GTAACTTTAGCTTGTTTTGTGCTTGCTGCTGTTTACAGAATAAATTGGATCACCGGTGGAATTGCTATCGCAATGGCTTGTC
TTGTAGGCTTGATGTGGCTCAGCTACTTCATTGCTTCTTTCAGACTGTTTGCGCGTACGCGTTCCATGTGGTCATTCAATCCA
GAAACTAACATTCTTCTCAACGTGCCACTCCATGGCACTATTCTGACCAGACCGCTTCTAGAAAGTGAACTCGTAATCGGAG
CTGTGATCCTTCGTGGACATCTTCGTATTGCTGGACACCATCTAGGACGCTGTGACATCAAGGACCTGCCTAAAGAAATCA
CTGTTGCTACATCACGAACGCTTTCTTATTACAAATTGGGAGCTTCGCAGCGTGTAGCAGGTGACTCAGGTTTTGCTGCAT
ACAGTCGCTACAGGATTGGCAACTATAAATTAAACACAGACCATTCCAGTAGCAGTGACAATATTGCTTTGCTTGTACAGT
AAGTGACAACAGATGTTTCATCTCGTTGACTTTCAGGTTACTATAGCAGAGATATTACTAATTATTATGAGGACTTTTAAAG
TTTCCATTTGGAATCTTGATTACATCATAAACCTCATAATTAAAAATTTATCTAAGTCACTAACTGAGAATAAATATTCTCAA
TTAGATGAAGAGCAACCAATGGAGATTGATTAAACGAACATGAAAATTATTCTTTTCTTGGCACTGATAACACTCGCTACTT
GTGAGCTTTATCACTACCAAGAGTGTGTTAGAGGTACAACAGTACTTTTAAAAGAACCTTGCTCTTCTGGAACATACGAGG
GCAATTCACCATTTCATCCTCTAGCTGATAACAAATTTGCACTGACTTGCTTTAGCACTCAATTTGCTTTTGCTTGTCCTGAC
GGCGTAAAACACGTCTATCAGTTACGTGCCAGATCAGTTTCACCTAAACTGTTCATCAGACAAGAGGAAGTTCAAGAACTT
TACTCTCCAATTTTTCTTATTGTTGCGGCAATAGTGTTTATAACACTTTGCTTCACACTCAAAAGAAAGACAGAATGATTGAA
CTTTCATTAATTGACTTCTATTTGTGCTTTTTAGCCTTTCTGCTATTCCTTGTTTTAATTATGCTTATTATCTTTTGGTTCTCACT
TGAACTGCAAGATCATAATGAAACTTGTCACGCCTAAACGAACATGAAATTTCTTGTTTTCTTAGGAATCATCACAACTGTA
GCTGCATTTCACCAAGAATGTAGTTTACAGTCATGTACTTAACATCAACCATATGTAGTTGATGACCCGTGTCCTATTCACTT
CTATTCTAAATGGTATATTAGAGTAGGAGCTATAAAATCAGCACCTTTAATTGAATTGTGCGTGGATGAGGCTGGTTCTAA
ATCACCCATTCAGTGCATCGATATCGGTAATTATACAGTTTCCTGTTTACCTTTTACAATTAATTGCCAGGAACCTAAATTGG
GTAGTCTTGTAGTGCGTTGTTCGTTCTATGAAGACTTTTTAGAGTATCATGACGTTCGTGTTGTTTTAGATTTCATCTAAACG
AACAAACTAAATGTCTCTAAATGGACCCCAAAATCAGCGAAATGCACCCCGCATTACGTTTGGTGGACCCTCAGATTCAAC
TGGCAGTAACCAGAATGGAGAACGCAGTGGGGCGCGATCAAAACAACGTCGGCCCCAAGGTTTACCCAATAATACTGCGT
CTTGGTTCACCGCTCTCACTCAACATGGCAAGGAAGACCTTAAATTCCCTCGAGGACAAGGCGTTCCAATTAACACCAATA
GCAGTCCAGATGACCAAATTGGCTACTACCGAAGAGCTACCAGACGAATTCGTGGTGGTGACGGTAAAATGAAAGATCTC
AGTCCAAGATGGTATTTCTACTACCTAGGAACTGGGCCAGAAGCTGGACTTCCCTATGGTGCTAACAAAGACGGCATCATA
TGGGTTGCAACTGAGGGAGCCTTGAATACACCAAAAGATCACATTGGCACCCGCAATCCTGCTAACAATGCTGCAATCGTG
CTACAACTTCCTCAAGGAACAACATTGCCAAAAGGCTTCTACGCAGAAGGGAGCAGAGGCGGCAGTCAAGCCTCTTCTCG
TTCCTCATCACGTAGTCGCAACAGTTCAAGAAATTCAACTCCAGGCAGCAGTAAACGAACTTCTCCTGCTAGAATGGCTGG
CAATGGCGGTGATGCTGCTCTTGCTTTGCTGCTGCTTGACAGATTGAACCAGCTTGAGAGCAAAATGTTTGGTAAAGGCCA
ACAACAACAAGGCCAAACTGTCACTAAGAAATCTGCTGCTGAGGCTTCTAAGAAGCCTCGGCAAAAACGTACTGCCACTA
AAGCATACAATGTAACACAAGCTTTCGGCAGACGTGGTCCAGAACAAACCCAAGGAAATTTTGGGGACCAGGAACTAATC
AGACAAGGAACTGATTACAAACATTGGCCGCAAATTGCACAATTTGCCCCCAGCGCTTCAGCGTTCTTCGGAATGTCGCGC
ATTGGCATGGAAGTCACACCTTCGGGAACGTGGTTGACCTACACAGGTGCCATCAAATTGGATGACAAAGATCCAAATTTC
AAAGATCAAGTCATTTTGCTGAATAAGCATATTGACGCATACAAAACATTCCCACCAACAGAGCCTAAAAAGGACAAAAAG
AAGAAGGCTGATGAAACTCAAGCCTTACCGCAGAGACAGAAGAAACAGCAAACTGTGACTCTTCTTCCTGCTGCAGATTT
GGATGATTTCTCCAAACAATTGCAACAATCCATGAGCAGTGCTGACTCAACTCAGGCCTAAACTCATGCAGACCACACAAG
GCAGATGGGCTATATAAACGTTTTCGCTTTTCCGTTTACGATATATAGTCTACTCTTGTGCAGAATGAATTCTCGTAACTACA
TAGCACAAGTAGATGTAGTTAACTTTAATCTCACATAGCAATCTTTAATCAGTGTGTAACATTAGGGAGGACTTGAAAGAG
CCACCACATTTTCACCGAGGCCACGCGGAGTACGATCGAGTGTACAGTGAACAATGCTAGGGAGAGCTGCCTATATGGAA
GAGCCCTAATGTGTAAAATTAATTTTAGTAGTGCTATCCCCATGTGATTTTAATAGCTTCTTAGGAGAATGNNNNNNNNN
NNNNNNNNNNNNNNNNNNNNNNNNNN
SEQ ID NO: 23
> MIG457_gp02 surface glycoprotein, from UK_MIG457
MFVFLVLLPLVSSQCVNLTTRTQLPPAYTNSFTRGVYYPDKVFRSSVLHSTQDLFLPFFSNVTWFHAISGTNGTKRFDNPVLPFN
DGVYFASTEKSNIIRGWIFGTTLDSKTQSLLIVNNATNVVIKVCEFQFCNDPFLGVYHKNNKSWMESEFRVYSSANNCTFEYVSQ
PFLMDLEGKQGNFKNLREFVFKNIDGYFKIYSKHTPINLVRDLPQGFSALEPLVDLPIGINITRFQTLLALHRSYLTPGDSSSGWTA
GAAAYYVGYLQPRTFLLKYNENGTITDAVDCALDPLSETKCTLKSFTVEKGIYQTSNFRVQPTESIVRFPNITNLCPFGEVFNATRF
ASVYAWNRKRISNCVADYSVLYNSASFSTFKCYGVSPTKLNDLCFTNVYADSFVIRGDEVRQIAPGQTGKIADYNYKLPDDFTGC
VIAWNSNNLDSKVGGNYNYLYRLFRKSNLKPFERDISTEIYQAGSTPCNGVEGFNCYFPLQSYGFQPTYGVGYQPYRVVVLSFEL
LHAPATVCGPKKSTNLVKNKCVNFNFNGLTGTGVLTESNKKELPFQQFGRDIDDTTDAVRDPQTLEILDITPCSFGGVSVITPGT
NTSNQVAVLYQGVNCTEVPVAIHADQLTPTWRVYSTGSNVFQTRAGCLIGAEHVNNSYECDIPIGAGICASYQTQTNSHRRAR
SVASQSIIAYTMSLGAENSVAYSNNSIAIPINFTISVTTEILPVSMTKTSVDCTMYICGDSTECSNLLLQYGSFCTQLNRALTGIAVE
QDKNTQEVFAQVKQIYKTPPIKDFGGFNFSQILPDPSKPSKRSFIEDLLFNKVTLADAGFIKQYGDCLGDIAARDLICAQKFNGLTV
LPPLLTDEMIAQYTSALLAGTITSGWTFGAGAALQIPFAMQMAYRFNGIGVTQNVLYENQKLIANQFNSAIGKIQDSLSSTASAL
GKLQDVVNQNADALNTLVKQLSSNFGAISSVLNDILARLDKVEAEVQIDRLITGRLQSLQTYVTQQLIRAAEIRASANLAATKMS
ECVLGQSKRVDFCGKGYHLMSFPQSAPHGVVFLHVTYVPAQEKNFTTAPAICHDGKAHFPREGVFVSNGTHWFVTQRNFYEP
QIITTHNTFVSGNCDVVIGIVNNTVYDPLQPELDSFKEELDKYFKNHTSPDVDLGDISGINASVVNIQKEIDRLNEVAKNLNESLID
LQELGKYEQYIKWPWYIWLGFIAGLIAIVMVTIMLCCMTSCCSCLKGCCSCGSCCKFDEDDSEPVLKGVKLHYT
SEQ ID NO: 24
>MW493681.1 Severe acute respiratory syndrome coronavirus 2 isolate SARS-CoV-2/human/USA/NMDOH-
2021013232/2021, complete genome. [Severe acute respiratory syndrome coronavirus 2 (SARS-CoV-2)],
Californian B.1.427 lineage
AAGGTTTATACCTTCCCAGGTAACAAACCAACCAACTTTCGATCTCTTGTAGATCTGTTCTCTAAACGAACTTTAAAATCTGT
GTGGCTGTCACTCGGCTGCATGCTTAGTGCACTCACGCAGTATAATTAATAACTAATTACTGTCGTTGACAGGACACGAGT
AACTCGTCTATCTTCTGCAGGCTGCTTACGGTTTCGTCCGTGTTGCAGCCGATCATCAGCACATCTAGGTTTTGTCCGGGTG
TGACCGAAAGGTAAGATGGAGAGCCTTGTCCCTGGTTTCAACGAGAAAACACACGTCCAACTCAGTTTGCCTGTTTTACAG
GTTCGCGACGTGCTCGTACGTGGCTTTGGAGACTCCGTGGAGGAGGTCTTATCAGAGGCACGTCAACATCTTAAAGATGG
CACTTGTGGCTTAGTAGAAGTTGAAAAAGGCGTTTTGCCTCAACTTGAACAGCCCTATGTGTTCATCAAACGTTCGGATGC
TCGAACTGCACCTCATGGTCATGTTATGGTTGAGCTGGTAGCAGAACTCGAAGGCATTCAGTACGGTCGTAGTGGTGAGA
CACTTGGTGTCCTTGTCCCTCATGTGGGCGAAATACCAGTGGCTTACCGCAAGGTTCTTCTTCGTAAGAACGGTAATAAAG
GAGCTGGTGGCCATAGTTACGGCGCCGATCTAAAGTCATTTGACTTAGGCGACGAGCTTGGCACTGATCCTTATGAAGATT
TTCAAGAAAACTGGAACACTAAACATAGCAGTGGTGTTACCCGTGAACTCATGCGTGAGCTTAACGGAGGGGCATACACT
CGCTATGTCGATAACAACTTCTGTGGCCCTGATGGCTACCCTCTTGAGTGCATTAAAGACCTTCTAGCACGTGCTGGTAAA
GCTTCATGCACTTTGTCCGAACAACTGGACTTTATTGACACTAAGAGGGGTGTATACTGCTGCCGTGAACATGAGCATGAA
ATTGCTTGGTACACGGAACGTTCTGAAAAGAGCTATGAATTGCAGACACCTTTTGAAATTAAATTGGCAAAGAAATTT
GACATCTTCAATGGGGAATGTCCAAATTTTGTATTTCCCTTAAATTCCATAATCAAGACTATTCAACCAAGGGTTGAAAAGA
AAAAGCTTGATGGCTTTATGGGTAGAATTCGATCTGTCTATCCAGTTGCGTCACCAAATGAATGCAACCAAATGTGCCTTTC
AACTCTCATGAAGTGTGATCATTGTGGTGAAACTTCATGGCAGACGGGCGATTTTGTTAAAGCCACTTGCGAATTTTGTGG
CACTGAGAATTTGACTAAAGAAGGTGCCACTACTTGTGGTTACTTACCCCAAAATGCTGTTGTTAAAATTTATTGTCCAGCA
TGTCACAATTCAGAAGTAGGACCTGAGCATAGTCTTGCCGAATACCATAATGAATCTGGCTTGAAAACCATTCTTCGTAAG
GGTGGTCGCACTATTGCCTTTGGAGGCTGTGTGTTCTCTTATGTTGGTTGCCATAACAAGTGTGCCTATTGGGTTCCACGTG
CTAGCGCTAACATAGGTTGTAACCATACAGGTGTTGTTGGAGAAGGTTCCGAAGGTCTTAATGACAACCTTCTTGAAATAC
TCCAAAAAGAGAAAGTCAACATCAATATTGTTGGTGACTTTAAACTTAATGAAGAGATCGCCATTATTTTGGCATCTTTTTC
TGCTTCCACAAGTGCTTTTGTGGAAACTGTGAAAGGTTTGGATTATAAAGCATTCAAACAAATTGTTGAATCCTGTGGTAAT
TTTAAAGTTACAAAAGGAAAAGCTAAAAAAGGTGCCTGGAATATTGGTGAACAGAAATCAATACTGAGTCCTCTTTATGCA
TTTGCATCAGAGGCTGCTCGTGTTGTACGATCAATTTTCTCCCGCACTCTTGAAACTGCTCAAAATTCTGTGCGTGTTTTACA
GAAGGCCGCTATAACAATACTAGATGGAATTTCACAGTATTCACTGAGACTCATTGATGCTATGATGTTCACATCTGATTT
GGCTACTAACAATCTAGTTGTAATGGCCTACATTACAGGTGGTGTTGTTCAGTTGACTTCGCAGTGGCTAACTAACATCTTT
GGCACTGTTTATGAAAAACTCAAACCCGTCCTTGATTGGCTTGAAGAGAAGTTTAAGGAAGGTGTAGAGTTTCTTAGAGAC
GGTTGGGAAATTGTTAAATTTATCTCAACCTGTGCTTGTGAAATTGTCGGTGGACAAATTGTCACCTGTGCAAAGGAAATT
AAGGAGAGTGTTCAGACATTCTTTAAGCTTGTAAATAAATTTTTGGCTTTGTGTGCTGACTCTATCATTATTGGTGGAGCTA
AACTTAAAGCCTTGAATTTAGGTGAAACATTTGTCACGCACTCAAAGGGATTGTACAGAAAGTGTGTTAAATCCAGAGAAG
AAACTGGCCTACTCATGCCTCTAAAAGCCCCAAAAGAAATTATCTTCTTAGAGGGAGAAACACTTCCCACAGAAGTGTTAA
CAGAGGAAGTTGTCTTGAAAACTGGTGATTTACAACCATTAGAACAACCTACTAGTGAAGCTGTTGAAGCTCCATTGGTTG
GTACACCAGTTTGTATTAACGGGCTTATGTTGCTCGAAATCAAAGACACAGAAAAGTACTGTGCCCTTGCACCTAATATGA
TGGTAACAAACAATACCTTCACACTCAAAGGCGGTGCACCAACAAAGGTTACTTTTGGTGATGACACTGTGATAGAAGTGC
AAGGTTACAAGAGTGTGAATATCACTTTTGAACTTGATGAAAGGATTGATAAAGTACTTAATGAGAAGTGCTCTGCCTATA
CAGTTGAACTCGGTACAGAAGTAAATGAGTTCGCCTGTGTTGTGGCAGATGCTGTCATAAAAACTTTGCAACCAGTATCTG
AATTACTTACACCACTGGGCATTGATTTAGATGAGTGGAGTATGGCTACATACTACTTATTTGATGAGTCTGGTGAGTTTAA
ATTGGCTTCACATATGTATTGTTCTTTTTACCCTCCAGATGAGGATGAAGAAGAAGGTGATTGTGAAGAAGAAGAGTTTGA
GCCATCAACTCAATATGAGTATGGTACTGAAGATGATTACCAAGGTAAACCTTTGGAATTTGGTGCCACTTCTGCTGCTCTT
CAACCTGAAGAAGAGCAAGAAGAAGATTGGTTAGATGATGATAGTCAACAAACTGTTGGTCAACAAGACGGCAGTGAGG
ACAATCAGACAACTACTATTCAAACAATTGTTGAGGTTCAACCTCAATTAGAGATGGAACTTACACCAGTTGTTCAGACTAT
TGAAGTGAATAGTTTTAGTGGTTATTTAAAACTTACTGACAATGTATACATTAAAAATGCAGACATTGTGGAAGAAGCTAA
AAAGGTAAAACCAACAGTGGTTGTTAATGCAGCCAATGTTTACCTTAAACATGGAGGAGGTGTTGCAGGAGCCTTAAATA
AGGCTACTAACAATGCCATGCAAGTTGAATCTGATGATTACATAGCTACTAATGGACCACTTAAAGTGGGTGGTAGTTGT
GTTTTAAGCGGACACAATCTTGCTAAACACTGTCTTCATGTTGTCGGCCCAAATGTTAACAAAGGTGAAGACATTCAACTTC
TTAAGAGTGCTTATGAAAATTTTAATCAGCACGAAGTTCTACTTGCACCATTATTATCAGCTGGTATTTTTGGTGCTGACCCT
ATACATTCTTTAAGAGTTTGTGTAGATACTGTTCGCACAAATGTCTACTTAGCTGTCTTTGATAAAAATCTCTATGACAAACT
TGTTTCAAGCTTTTTGGAAATGAAGAGTGAAAAGCAAGTTGAACAAAAGATCGCTGAGATTCCTAAAGAGGAAGTTAAGC
CATTTATAACTGAAAGTAAACCTTCAGTTGAACAGAGAAAACAAGATGATAAGAAAATCAAAGCTTGTGTTGAAGAAGTT
ACAACAACTCTGGAAGAAACTAAGTTCCTCACAGAAAACTTGTTACTTTATATTGACATTAATGGCAATCTTCATCCAGATT
CTGCCACTCTTGTTAGTGACATTGACATCACTTTCTTAAAGAAAGATGCTCCATATATAGTGGGTGATGTTGTTCAAGAGGG
TGTTTTAACTGCTGTGGTTATACCTACTAAAAAGGCTGGTGGCACTACTGAAATGCTAGCGAAAGCTTTGAGAAAAGTGCC
AACAGACAATTATATAACCACTTACCCGGGTCAGGGTTTAAATGGTTACACTGTAGAGGAGGCAAAGACAGTGCTTAAAA
AGTGTAAAAGTGCCTTTTACATTCTACCATCTATTATCTCTAATGAGAAGCAAGAAATTCTTGGAACTGTTTCTTGGAATTTG
CGAGAAATGCTTGCACATGCAGAAGAAACACGCAAATTAATGCCTGTCTGTGTGGAAACTAAAGCCATAGTTTCAACTATA
CAGCGTAAATATAAGGGTATTAAAATACAAGAGGGTGTGGTTGATTATGGTGCTAGATTTTACTTTTACACCAGTAAAACA
ACTGTAGCGTCACTTATCAACACACTTAACGATCTAAATGAAACTCTTGTTACAATGCCACTTGGCTATGTAACACATGGCT
TAAATTTGGAAGAAGCTGCTCGGTATATGAGATCTCTCAAAGTGCCAGCTACAGTTTCTGTTTCTTCACCTGATGCTGTTAC
AGCGTATAATGGTTATCTTACTTCTTCTTCTAAAACACCTGAAGAACATTTTATTGAAACCATCTCACTTGCTGGTTCCTATA
AAGATTGGTCCTATTCTGGACAATCTACACAACTAGGTATAGAATTTCTTAAGAGAGGTGATAAAAGTGTATATTACACTA
GTAATCCTACCACATTCCACCTAGATGGTGAAGTTATCACCTTTGACAATCTTAAGACACTTCTTTCTTTGAGAGAAGTGAG
GACTATTAAGGTGTTTACAACAGTAGACAACATTAACCTCCACACGCAAGTTGTGGACATGTCAATGACATATGGACAACA
GTTTGGTCCAACTTATTTGGATGGAGCTGATGTTACTAAAATAAAACCTCATAATTCACATGAAGGTAAAACATTTTATGTT
TTACCTAATGATGACACTCTACGTGTTGAGGCTTTTGAGTACTACCACACAACTGATCCTAGTTTTCTGGGTAGGTACATGT
CAGCATTAAATCACACTAAAAAGTGGAAATACCCACAAGTTAATGGTTTAACTTCTATTAAATGGGCAGATAACAACTGTT
ATCTTGCCACTGCATTGTTAACACTCCAACAAATAGAGTTGAAGTTTAATCCACCTGCTCTACAAGATGCTTATTACAGAGC
AAGGGCTGGTGAAGCTGCTAACTTTTGTGCACTTATCTTAGCCTACTGTAATAAGACAGTAGGTGAGTTAGGTGATGTTAG
AGAAACAATGAGTTACTTGTTTCAACATGCCAATTTAGATTCTTGCAAAAGAGTCTTGAACGTGGTGTGTAAAACTTGTGG
ACAACAGCAGACAACCCTTAAGGGTGTAGAAGCTGTTATGTACATGGGCACACTTTCTTATGAACAATTTAAGAAAGGTGT
TCAGATACCTTGTACGTGTGGTAAACAAGCTACAAAATATCTAGTACAACAGGAGTCACCTTTTGTTATGATGTCAGCACCA
CCTGCTCAGTATGAACTTAAGCATGGTACATTTACTTGTGCTAGTGAGTACACTGGTAATTACCAGTGTGGTCACTATAAAC
ATATAACTTCTAAAGAAACTTTGTATTGCATAGACGGTGCTTTACTTACAAAGTCCTCAGAATACAAAGGTCCTATTACGGA
TGTTTTCTACAAAGAAAACAGTTACACAACAACCATAAAACCAGTTACTTATAAATTGGATGGTGTTGTTTGTACAGAAATT
GÅCCCTAAGTTGGACAATTATTATAAGAAAGACAATTCTTATTTCACAGAGCAACCAATTGATCTTGTACCAAACCAACCAT
ATCCAAACGCAAGCTTCGATAATTTTAAGTTTGTATGTGATAATATCAAATTTGCTGATGATTTAAACCAGTTAACTGGTTA
TAAGAAACCTGCTTCAAGAGAGCTTAAAGTTACATTTTTCCCTGACTTAAATGGTGATGTGGTGGCTATTGATTATAAACAC
TACACACCCTCTTTTAAGAAAGGAGCTAAATTGTTACATAAACCTATTGTTTGGCATGTTAACAATGCAACTAATAAAGCCA
CGTATAAACCAAATACCTGGTGTATACGTTGTCTTTGGAGCACAAAACCAGTTGAAACATCAAATTCGTTTGATGTACTGAA
GTCAGAGGACGCGCAGGGAATGGATAATCTTGTCTGCGAAGATCTAAAACCAGTCTCTGAAGAAGTAGTGGAAAATCCTA
CCATACAGAAAGACGTTCTTGAGTGTAATGTGAAAACTACCGAAGTTGTAGGAGACATTATACTTAAACCAGCAAATAATA
GTTTAAAAATTACAGAAGAGGTTGGCCACACAGATCTAATGGCTGCTTATGTAGACAATTCTAGTCTTACTATTAAGAAAC
CTAATGAATTATCTAGAGTATTAGGTTTGAAAACCCTTGCTACTCATGGTTTAGCTGCTGTTAATAGTGTCCCTTGGGATAC
TATAGCTAATTATGCTAAGCCTTTTCTTAACAAAGTTGTTAGTACAACTACTAACATAGTTACACGGTGTTTAAACCGTGTTT
GTACTAATTATATGCCTTATTTCTTTACTTTATTGCTACAATTGTGTACTTTTACTAGAAGTACAAATTCTAGAATTAAAGCAT
CTATGCCGACTACTATAGCAAAGAATACTGTTAAGAGTGTCGGTAAATTTTGTCTAGAGGCTTCATTTAATTATTTGAAGTC
ACCTAATTTTTCTAAACTGATAAATATTATAATTTGGTTTTTACTATTAAGTGTTTGCCTAGGTTCTTTAATCTACTCAACCGC
TGCTTTAGGTGTTTTAATGTCTAATTTAGGCATGCCTTCTTACTGTACTGGTTACAGAGAAGGCTATTTGAACTCTACTAATG
TCACTATTGCAACCTACTGTACTGGTTCTATACCTTGTAGTGTTTGTCTTAGTGGTTTAGATTCTTTAGACACCTATCCTTCTT
TAGAAACTATACAAATTACCATTTCATCTTTTAAATGGGATTTAACTGCTTTTGGCTTAGTTGCAGAGTGGTTTTTGGCATAT
ATTCTTTTCACTAGGTTTTTCTATGTACTTGGATTGGCTGCAATCATGCAATTGTTTTTCAGCTATTTTGCAGTACATTTTATT
AGTAATTCTTGGCTTATGTGGTTAATAATTAATCTTGTACAAATGGCCCCGATTTCAGCTATGGTTAGAATGTACATCTTCT
TTGCATCATTTTATTATGTATGGAAAAGTTATGTGCATGTTGTAGACGGTTGTAATTCATCAACTTGTATGATGTGTTACAA
ACGTAATAGAGCAACAAGAGTCGAATGTACAACTATTGTTAATGGTGTTAGAAGGTCCTTTTATGTCTATGCTAATGGAGG
TAAAGGCTTTTGCAAACTACACAATTGGAATTGTGTTAATTGTGATACATTCTGTGCTGGTAGTACATTTATTAGTGATGAA
GTTGCGAGAGACTTGTCACTACAGTTTAAAAGACCAATAAATCCTACTGACCAGTCTTCTTACATCGTTGATAGTGTTACAG
TGAAGAATGGTTCCATCCATCTTTACTTTGATAAAGCTGGTCAAAAGACTTATGAAAGACATTCTCTCTCTCATTTTGTTAAC
TTAGACAACCTGAGAGCTAATAACACTAAAGGTTCATTGCCTATTAATGTTATAGTTTTTGATGGTAAATCAAAATGTGAAG
AATCATCTGCAAAATCAGCGTCTGTTTACTACAGTCAGCTTATGTGTCAACCTATACTGTTACTAGATCAGGCATTAGTGTC
TGATGTTGGTGATAGTGCGGAAGTTGCAGTTAAAATGTTTGATGCTTACGTTAATACGTTTTCATCAACTTTTAACGTACCA
ATGGAAAAACTCAAAACACTAGTTGCAACTGCAGAAGCTGAACTTGCAAAGAATGTGTCCTTAGACAATGTCTTATCTACT
TTTATTTCAGCAGCTCGGCAAGGGTTTGTTGATTCAGATGTAGAAACTAAAGATGTTGTTGAATGTCTTAAATTGTCACATC
AATCTGACATAGAAGTTACTGGCGATAGTTGTAATAACTATATGCTCACCTATAACAAAGTTGAAAACATGACACCCCGTG
ACCTTGGTGCTTGTATTGACTGTAGTGCGCGTCATATTAATGCGCAGGTAGCAAAAAGTCACAACATTGCTTTGATATGGA
ACGTTAAAGATTTCATGTCATTGTCTGAACAACTACGAAAACAAATACGTAGTGCTGCTAAAAAGAATAACTTACCTTTTAA
GTTGACATGTGCAACTACTAGACAAGTTGTTAATGTTGTAACAACAAAGATAGCACTTAAGGGTGGTAAAATTGTTAATAA
TTGGTTGAAGCAGTTAATTAAAGTTACACTTGTGTTCCTTTTTGTTGCTGCTATTTTCTATTTAATAACACCTGTTCATGTCAT
GTCTAAACATACTGACTTTTCAAGTGAAATCATAGGATACAAGGCTATTGATGGTGGTGTCACTCGTGACATAGCATCTAC
AGATACTTGTTTTGCTAACAAACATGCTGATTTTGACACATGGTTTAGCCAGCGTGGTGGTAGTTATACTAATGACAAAGCT
TGCCCATTGATTGCTGCAGTCATAACAAGAGAAGTGGGTTTTGTCGTGCCTGGTTTGCCTGGCACGATATTACGCACAACT
AATGGTGACTTTTTGCATTTCTTACCTAGAGTTTTTAGTGCAGTTGGTAACATCTGTTACACACCATCAAAACTTATAGAGTA
CACTGACTTTGCAACATCAGCTTGTGTTTTGGCTGCTGAATGTACAATTTTTAAAGATGCTTCTGGTAAGCCAGTACCATAT
TGTTATGATACCAATGTACTAGAAGGTTCTGTTGCTTATGAAAGTTTACGCCCTGACACACGTTATGTGCTCATGGATGGCT
CTATTATTCAATTTCCTAACACCTACCTTGAAGGTTCTGTTAGAGTGGTAACAACTTTTGATTCTGAGTACTGTAGGCACGG
CACTTGTGAAAGATCAGAAGCTGGTGTTTGTGTATCTACTAGTGGTAGATGGGTACTTAACAATGATTATTACAGATCTTTA
CCAGGAGTTTTCTGTGGTGTAGATGCTGTAAATTTACTTACTAATATGTTTACACCACTAATTCAACCTATTGGTGCTTTGGA
CATATCAGCATCTATAGTAGCTGGTGGTATTGTAGCTATCGTAGTAACATGCCTTGCCTACTATTTTATGAGGTTTAGAAGA
GCTTTTGGTGAATACAGTCATGTAGTTGCCTTTAATACTTTACTATTCCTTATGTCATTCACTGTACTCTGTTTAACACCAGTT
TACTCATTCTTACCTGGTGTTTATTCTGTTATTTACTTGTACTTGACATTTTATCTTACTAATGATGTTTCTTTTTTAGCACATA
TTCAGTGGATGGTTATGTTCACACCTTTAGTACCTTTCTGGATAACAATTGCTTATATCATTTGTATTTCCACAAAGCATTTCT
ATTGGTTCTTTACTAATTACCTAAAGAGACGTGTAGTCTTTAATGGTGTTTCCTTTAGTACTTTTGAAGAAGCTGCGCTGTG
CACCTTTTTGTTAAATAAAGAAATGTATCTAAAGTTGCGTAGTGATGTGCTATTACCTCTTACGCAATATAATAGATACTTA
GCTCTTTATAATAAGTACAAGTATTTTAGTGGAGCAATGGATACAACTAGCTACAGAGAAGCTGCTTGTTGTCATCTCGCA
AAGGCTCTCAATGACTTCAGTAACTCAGGTTCTGATGTTCTTTACCAACCACCACAAACCTCTATCACCTCAGCTGTTTTGCA
GAGTGGTTTTAGAAAAATGGCATTCCCATCTGGTAAAGTTGAGGGTTGTATGGTACAAGTAACTTGTGGTACAACTACACT
TAACGGTCTTTGGCTTGATGACGTAGTTTACTGTCCAAGACATGTGATCTGCACCTCTGAAGACATGCTTAACCCTAATTAT
GAAGATTTACTCATTCGTAAGTCTAATCATAATTTCTTGGTACAGGCTGGTAATGTTCAACTCAGGGTTATTGGACATTCTA
TGCAAAATTGTGTACTTAAGCTTAAGGTTGATACAGCCAATCCTAAGACACCTAAGTATAAGTTTGTTCGCATTCAACCAGG
ACAGACTTTTTCAGTGTTAGCTTGTTACAATGGTTCACCATCTGGTGTTTACCAATGTGCTATGAGGCCCAATTTCACTATTA
AGGGTTCATTCCTTAATGGTTCATGTGGTAGTGTTGGTTTTAACATAGATTATGACTGTGTCTCTTTTTGTTACATGCACCAT
ATGGAATTACCAACTGGAGTTCATGCTGGCACAGACTTAGAAGGTAACTTTTATGGACCTTTTGTTGACAGGCAAACAGCA
CAAGCAGCTGGTACGGACACAACTATTACAGTTAATGTTTTAGCTTGGTTGTACGCTGCTGTTATAAATGGAGACAGGTGG
TTTCTCAATCGATTTACCACAACTCTTAATGACTTTAACCTTGTGGCTATGAAGTACAATTATGAACCTCTAACACAAGACCA
TGTTGACATACTAGGACCTCTTTCTGCTCAAACTGGAATTGCCGTTTTAGATATGTGTGCTTCATTAAAAGAATTACTGCAA
AATGGTATGAATGGACGTACCATATTGGGTAGTGCTTTATTAGAAGATGAATTTACACCTTTTGATGTTGTTAGACAATGCT
CAGGTGTTACTTTCCAAAGTGCAGTGAAAAGAACAATCAAGGGTACACACCACTGGTTGTTACTCACAATTTTGACTTCACT
TTTAGTTTTAGTCCAGAGTACTCAATGGTCTTTGTTCTTTTTTTTGTATGAAAATGCCTTTTTACCTTTTGCTATGGGTATTAT
TGCTATGTCTGCTTTTGCAATGATGTTTGTCAAACATAAGCATGCATTTCTCTGTTTGTTTTTGTTACCTTCTCTTGCCACTG
TAGCTTATTTTAATATGGTCTATATGCCTGCTAGTTGGGTGATGCGTATTATGACATGGTTGGATATGGTTGATACTAGTTT
GTCTGGTTTTAAGCTAAAAGACTGTGTTATGTATGCATCAGCTGTAGTGTTACTAATCCTTATGACAGCAAGAACTGTGTAT
GATGATGGTGCTAGGAGAGTGTGGACACTTATGAATGTCTTGACACTCGTTTATAAAGTTTATTATGGTAATGCTTTAGAT
CAAGCCATTTCCATGTGGGCTCTTATAATCTCTGTTACTTCTAACTACTCAGGTGTAGTTACAACTGTCATGTTTTTGGCCAA
AGGTATTGTTTTTATGTGTGTTGAGTATTGCCCTATTTTCTTCATAACTGGTAATACACTTCAGTGTATAATGCTAGTTTATT
GTTTCTTAGGCTATTTTTGTACTTGTTACTTTGGCCTCTTTTGTTTACTCAACCGCTACTTTAGACTGACTCTTGGTGTTTATG
ATTACTTAGTTTCTACACAGGAGTTTAGATATATGAATTCACAGGGACTACTCCCACCCAAGAATAGCATAGATGCCTTCAA
ACTCAACATTAAATTGTTGGGTGTTGGTGGCAAACCTTGTATCAAAGTAGCCACTGTACAGTCTAAAATGTCAGATGTAAA
GTGCACATCAGTAGTCTTACTCTCAGTTTTGCAACAACTCAGAGTAGAATCATCATCTAAATTGTGGGCTCAATGTGTCCAG
TTACACAATGACATTCTCTTAGCTAAAGATACTACTGAAGCCTTTGAAAAAATGGTTTCACTACTTTCTGTTTTGCTTTCCAT
GCAGGGTGCTGTAGACATAAACAAGCTTTGTGAAGAAATGCTGGACAACAGGGCAACCTTACAAGCTATAGCCTCAGAGT
TTAGTTCCCTTCCATCATATGCAGCTTTTGCTACTGCTCAAGAAGCTTATGAGCAGGCTGTTGCTAATGGTGATTCTGAAGT
TGTTCTTAAAAAGTTGAAGAAGTCTTTGAATGTGGCTAAATCTGAATTTGACCGTGATGCAGCCATGCAACGTAAGTTGGA
AAAGATGGCTGATCAAGCTATGACCCAAATGTATAAACAGGCTAGATCTGAGGACAAGAGGGCAAAAGTTACTAGTGCTA
TGCAGACAATGCTTTTCACTATGCTTAGAAAGTTGGATAATGATGCACTCAACAACATTATCAACAATGCAAGAGATGGTT
GTGTTCCCTTGAACATAATACCTCTTACAACAGCAGCCAAATTAATGGTTGTCATACCAGACTATAACACATATAAAAATAC
GTGTGATGGTACAACATTTACTTATGCATCAGCATTGTGGGAAATCCAACAGGTTGTAGATGCAGATAGTAAAATTGTTCA
ACTTAGTGAAATTAGTATGGACAATTCACCTAATTTAGCATGGCCTCTTATTGTAACAGCTTTAAGGGCCAATTCTGCTGTC
AAATTACAGAATAATGAGCTTAGTCCTGTTGCACTACGACAGATGTCTTGTGCTGCCGGTACTACACAAACTGCTTGCACT
GATGACAATGCGTTAGCTTACTACAACACAACAAAGGGAGGTAGGTTTGTACTTGCACTGTTATCCGATTTACAGGATTTG
AAATGGGCTAGATTCCCTAAGAGTGATGGAACTGGTACTATCTATACAGAACTGGAACCACCTTGTAGGTTTGTTACAGAC
ACACCTAAAGGTCCTAAAGTGAAGTATTTATACTTTATTAAAGGATTAAACAACCTAAATAGAGGTATGGTACTTGGTAGT
TTAGCTGCCACAGTACGTCTACAAGCTGGTAATGCAACAGAAGTGCCTGCCAATTCAACTGTATTATCTTTCTGTGCTTTTG
CTGTAGATGCTGCTAAAGCTTACAAAGATTATCTAGCTAGTGGGGGACAACCAATCACTAATTGTGTTAAGATGTTGTGTA
CACACACTGGTACTGGTCAGGCAATAACAGTTACACCGGAAGCCAATATGGATCAAGAATCCTTTGGTGGTGCATCGTGTT
GTCTGTACTGCCGTTGCCACATAGATCATCCAAATCCTAAAGGATTTTGTGACTTAAAAGGTAAGTATGTACAAATACCTAC
AACTTGTGCTAATGACCCTGTGGGTTTTACACTTAAAAACACAGTCTGTACCGTCTGCGGTATGTGGAAAGGTTATGGCTG
TAGTTGTGATCAACTCCGCGAACCCATGCTTCAGTCAGCTGATGCACAATCGTTTTTAAACGGGTTTGCGGTGTAAGTGCA
GCCCGTCTTACACCGTGCGGCACAGGCACTAGTACTGATGTCGTATACAGGGCTTTTGACATCTACAATGATAAAGTAGCT
GGTTTTGCTAAATTCCTAAAAACTAATTGTTGTCGCTTCCAAGAAAAGGACGAAGATGACAATTTAATTGATTCTTACTTTG
TAGTTAAGAGACACACTTTCTCTAACTACCAACATGAAGAAACAATTTATAATTTACTTAAAGATTGTCCAGCTGTTGCTAA
ACATGACTTCTTTAAGTTTAGAATAGACGGTGACATGGTACCACATATATCACGTCAACGTCTTACTAAATACACAATGGCA
GACCTCGTCTATGCTTTAAGGCATTTTGATGAAGGTAATTGTGACACATTAAAAGAAATACTTGTCACATACAATTGTTGTG
ATGATGATTATTTCAATAAAAAGGACTGGTATGATTTTGTAGAAAACCCAGATATATTACGCGTATACGCCAACTTAGGTG
AACGTGTACGCCAAGCTTTGTTAAAAACAGTACAATTCTGTGATGCCATGCGAAATGCTGGTATTGTTGGTGTACTGACAT
TAGATAATCAAGATCTCAATGGTAACTGGTATGATTTCGGTGATTTCATACAAACCACGCCAGGTAGTGGAGTTCCTGTTG
TAGATTCTTATTATTCATTGTTAATGCCTATATTAACCTTGACCAGGGCTTTAACTGCAGAGTCACATGTTGACACTGACTTA
ACAAAGCCTTACATTAAGTGGGATTTGTTAAAATATGACTTCACGGAAGAGAGGTTAAAACTCTTTGACCGTTATTTTAAAT
ATTGGGATCAGACATACCACCCAAATTGTGTTAACTGTTTGGATGACAGATGCATTCTGCATTGTGCAAACTTTAATGTTTT
ATTCTCTACAGTGTTCCCACTTACAAGTTTTGGACCACTAGTGAGAAAAATATTTGTTGATGGTGTTCCATTTGTAGTTTCAA
CTGGATACCACTTCAGAGAGCTAGGTGTTGTACATAATCAGGATGTAAACTTACATAGCTCTAGACTTAGTTTTAAGGAAT
TACTTGTGTATGCTGCTGACCCTGCTATGCACGCTGCTTCTGGTAATCTATTACTAGATAAACGCACTACGTGCTTTTCAGTA
GCTGCACTTACTAACAATGTTGCTTTTCAAACTGTCAAACCCGGTAATTTTAACAAAGACTTCTATGACTTTGCTGTGTCTAA
GGGTTTCTTTAAGGAAGGAAGTTCTGTTGAATTAAAACACTTCTTCTTTGCTCÅGGATGGTAATGCTGCTATCAGCGATTAT
GACTACTATCGTTATAATCTACCAACAATGTGTGATATCAGACAACTACTATTTGTAGTTGAAGTTGTTGATAAGTACTTTG
ATTGTTACGATGGTGGCTGTATTAATGCTAACCAAGTCATCGTCAACAACCTAGACAAATCAGCTGGTTTTCCATTTAATAA
ATGGGGTAAGGCTAGACTTTATTATGATTCAATGAGTTATGAGGATCAAGATGCACTTTTCGCATATACAAAACGTAATGT
CATCCCTACTATAACTCAAATGAATCTTAAGTATGCCATTAGTGCAAAGAATAGAGCTCGCACCGTAGCTGGTGTCTCTATC
TGTAGTACTATGACCAATAGACAGTTTCATCAAAAATTATTGAAATCAATAGCCGCCACTAGAGGAGCTACTGTAGTAATT
GGAACAAGCAAATTCTATGGTGGTTGGCACAACATGTTAAAAACTGTTTATAGTGATGTAGAAAACCCTCACCTTATGGGT
TGGGATTATCCTAAATGTGATAGAGCCATGCCTAACATGCTTAGAATTATGGCCTCACTTGTTCTTGCTCGCAAACATACAA
CGTGTTGTAGCTTGTCACACCGTTTCTATAGATTAGCTAATGAGTGTGCTCAAGTATTGAGTGAAATGGTCATGTGTGGCG
GTTCACTATATGTTAAACCAGGTGGAACCTCATCAGGAGATGCCACAACTGCTTATGCTAATAGTGTTTTTAACATTTGTCA
AGCTGTCACGGCCAATGTTAATGCACTTTTATCTACTGATGGTAACAAAATTGCCGATAAGTATGTCCGCAATTTACAACAC
AGACTTTATGAGTGTCTCTATAGAAATAGAGATGTTGACACAGACTTTGTGAATGAGTTTTACGCATATTTGCGTAAACATT
TCTCAATGATGATACTCTCTGACGATGCTGTTGTGTGTTTCAATAGCACTTATGCATCTCAAGGTCTAGTGGCTAGCATAAA
GAACTTTAAGTCAGTTCTTTATTATCAAAACAATGTTTTTATGTCTGAAGCAAAATGTTGGACTGAGACTGACCTTACTAAA
GGACCTCATGAATTTTGCTCTCAACATACAATGCTAGTTAAACAGGGTGATGATTATGTGTACCTTCCTTACCCAGATCCAT
CAAGAATCCTAGGGGCCGGCTGTTTTGTAGATGATATCGTAAAAACAGATGGTACACTTATGATTGAACGGTTCGTGTCTT
TAGCTATAGATGCTTACCCACTTACTAAACATCCTAATCAGGAGTATGCTGATGTCTTTCATTTGTACTTACAATACATAAGA
AAGCTACATGATGAGTTAACAGGACACATGTTAGACATGTATTCTGTTATGCTTACTAATGATAACACTTCAAGGTATTGG
GAACCTGAGTTTTATGAGGCTATGTACACACCGCATACAGTCTTACAGGCTGTTGGGGCTTGTGTTCTTTGCAATTCACAGA
CTTCATTAAGATGTGGTGCTTGCATACGTAGACCATTCTTATGTTGTAAATGCTGTTACGACCATGTCATATCAACATCACAT
AAATTAGTCTTGTCTGTTAATCCGTATGTTTGCAATGCTCTAGGTTGTGATGTCACAGATGTGACTCAACTTTACTTAGGAG
GTATGAGCTATTATTGTAAATCACATAAACCACCCATTAGTTTTCCATTGTGTGCTAATGGACAAGTTTTTGGTTTATATAAA
AATACATGTGTTGGTAGCGATAATGTTACTGACTTTAATGCAATTGCAACATGTGACTGGACAAATGCTGGTGATTACATTT
TAGCTAACACCTGTACTGAAAGACTCAAGCTTTTTGCAGCAGAAACGCTCAAAGCTACTGAGGAGACATTTAAACTGTCTT
ATGGTATTGCTACTGTACGTGAAGTGCTGTCTGACAGAGAATTACATCTTTCATGGGAAGTTGGTAAACCTAGACCACCAC
TTAACCGAAATTATGTCTTTACTGGTTATCGTGTAACTAAAAACAGTAAAGTACAAATAGGAGAGTACACCTTTGAAAAAG
GTGACTATGGTGATGCTGTTGTTTACCGAGGTACAACAACTTACAAATTAAATGTTGGTGATTATTTTGTGCTGACATCACA
TACAGTAATGCCATTAAGTGCACCTACACTAGTGCCACAAGAGCACTATGTTAGAATTACTGGCTTATACCCAACACTCAAT
ATCTCATATGAGTTTTCTAGCAATGTTGCAAATTATCAAAAGGTTGGTATGCAAAAGTATTCTACACTCCAGGGACCACCTG
GTACTGGTAAGAGTCATTTTGCTATTGGCCTAGCTCTCTACTACCCTTCTGCTCGCATAGTGTATACAGCTTGCTCTCATGCC
GCTGTTGATGCACTATGTGAGAAGGCATTAAAATATTTGCCTATAGATAAATGTAGTAGAATTATACCTGCACGTGCTCGT
GTAGAGTGTTTTGATAAATTCAAAGTGAATTCAACATTAGAACAGTATGTCTTTTGTACTGTAAATGCATTGCCTGAGACGA
CAGCAGATATAGTTGTCTTTGATGAAATTTCAATGGCCACAAATTATGATTTGAGTGTTGTCAATGCCAGATTACGTGCTAA
GCACTATGTGTACATTGGCGACCCTGCTCAATTACCTGCACCACGCACATTGCTAACTAAGGGCACACTAGAACCAGAATA
TTTCAATTCAGTGTGTAGACTTATGAAAACTATAGGTCCAGACATGTTCCTCGGAACTTGTCGGCGTTGTCCTGCTGAAATT
GTTGACACTGTGAGTGCTTTGGTTTATGATAATAAGCTTAAAGCACATAAAGACAAATCAGCTCAATGCTTTAAAATGTTTT
ATAAGGGTGTTATCACGCATGATGTTTCATCTGCAATTAACAGGCCACAAATAGGCGTGGTAAGAGAATTCCTTACACGTA
ACCCTGCTTGGAGAAAAGCTGTCTTTATTTCACCTTATAATTCACAGAATGCTGTAGCCTCAAAGATTTTGGGACTACCAAC
TCAAACTGTTGATTCATCACAGGGCTCAGAATATGACTATGTCATATTCACTCAAACCACTGAAACAGCTCACTCTTGTAAT
GTAAACAGATTTAATGTTGCTATTACCAGAGCAAAAGTAGGCATACTTTGCATAATGTCTGATAGAGACCTTTATGACAAG
TTGCAATTTACAAGTCTTGAAATTCCACGTAGGAATGTGGCAACTTTACAAGCTGAAAATGTAACAGGACTCTTTAAAGATT
GTAGTAAGGTAATCACTGGGTTACATCCTACACAGGCACCTACACACCTCAGTGTTGACACTAAATTCAAAACTGAAGGTT
TATGTGTTGACATACCTGGCATACCTAAGGACATGACCTATAGAAGACTCATCTCTATGATGGGTTTTAAAATGAATTATCA
AGTTAATGGTTACCCTAACATGTTTATCACCCGCGAAGAAGCTATAAGACATGTACGTGCATGGATTGGCTTCGATGTCGA
GGGGTGTCATGCTACTAGAGAAGCTGTTGGTACCAATTTACCTTTACAGCTAGGTTTTTCTACAGGTGTTAACCTAGTTGCT
GTACCTACAGGTTATGTTGATACACCTAATAATACAGATTTTTCCAGAGTTAGTGCTAAACCACCGCCTGGAGATCAATTTA
AACACCTCATACCACTTATGTACAAAGGACTTCCTTGGAATGTAGTGCGTATAAAGATTGTACAAATGTTAAGTGACACACT
TAAAAATCTCTCTGACAGAGTCGTATTTGTCTTATGGGCACATGGCTTTGAGTTGACATCTATGAAGTATTTTGTGAAAATA
GGACCTGAGCGCACCTGTTGTCTATGTGATAGACGTGCCACATGCTTTTCCACTGCTTCAGACACTTATGCCTGTTGGCATC
ATTCTATTGGATTTGATTACGTCTATAATCCGTTTATGATTGATGTTCAACAATGGGGTTTTACAGGTAACCTACAAAGCAA
CCATGATCTGTATTGTCAAGTCCATGGTAATGCACATGTAGCTAGTTGTGATGCAATCATGACTAGGTGTCTAGCTGTCCAC
GAGTGCTTTGTTAAGCGTGTTGACTGGACTATTGAATATCCTATAATTGGTGATGAACTGAAGATTAATGCGGCTTGTAGA
AAGGTTCAACACATGGTTGTTAAAGCTGCATTATTAGCAGACAAATTCCCAGTTCTTCACGACATTGGTAACCCTAAAGCTA
TTAAGTGTGTACCTCAAGCTGATGTAGAATGGAAGTTCTATGATGCACAGCCTTGTAGTGACAAAGCTTATAAAATAGAAG
AATTATTCTATTCTTATGCCACACATTCTGACAAATTCACAGATGGTGTATGCCTATTTTGGAATTGCAATGTCGATAGATAT
CCTGCTAATTCCATTGTTTGTAGATTTGACACTAGAGTGCTATCTAACCTTAACTTGCCTGGTTGTGATGGTGGCAGTTTGT
ATGTAAATAAACATGCATTCCACACACCAGCTTTTGATAAAAGTGCTTTTGTTAATTTAAAACAATTACCATTTTTCTATTAC
TCTGACAGTCCATGTGAGTCTCATGGAAAACAAGTAGTGTCAGATATAGATTATGTACCACTAAAGTCTGCTACGTGTATA
ACACGTTGCAATTTAGGTGGTGCTGTCTGTAGACATCATGCTAATGAGTACAGATTGTATCTCGATGCTTATAACATGATG
ATCTCAGCTGGCTTTAGCTTGTGGGTTTACAAACAATTTGATACTTATAACCTCTGGAACACTTTTACAAGACTTCAGAGTTT
AGAAAATGTGGCTTTTAATGTTGTAAATAAGGGACACTTTGATGGACAACAGGGTGAAGTACCAGTTTCTATCATTAATAA
CACTGTTTACACAAAAGTTGATGGTGTTGATGTAGAATTGTTTGAAAATAAAACAACATTACCTGTTAATGTAGCATTTGAG
CTTTGGGCTAAGCGCAACATTAAACCAGTACCAGAGGTGAAAATACTCAATAATTTGGGTGTGGACATTGCTGCTAATACT
GTGATCTGGGACTACAAAAGAGATGCTCCAGCACATATATCTACTATTGGTGTTTGTTCTATGACTGACATAGCCAAGAAA
CCAACTGAAACGATTTGTGCACCACTCACTGTCTTTTTTGATGGTAGAGTTGATGGTCAAGTAGACTTATTTAGAAATGCCC
GTAATGGTGTTCTTATTACAGAAGGTAGTGTTAAAGGTTTACAACCATCTGTAGGTCCCAAACAAGCTAGTCTTAATGGAG
TCACATTAATTGGAGAAGCCGTAAAAACACAGTTCAATTATTATAAGAAAGTTGATGGTGTTGTCCAACAATTACCTGAAA
CTTACTTTACTCAGAGTAGAAATTTACAAGAATTTAAACCCAGGAGTCAAATGGAAATTGATTTCTTAGAATTAGCTATGGA
TGAATTCATTGAACGGTATAAATTAGAAGGCTATGCCTTCGAACATATCGTTTATGGAGATTTTAGTCATAGTCAGTTAGGT
GGTTTACATCTACTGATTGGACTAGCTAAACGTTTTAAGGAATCACCTTTTGAATTAGAAGATTTTATTCCTATGGACAGTA
CAGTTAAAAACTATTTCATAACAGATGCGCAAACAGGTTCATCTAAGTGTGTGTGTTCTGTTATTGATTTATTACTTGATGA
TTTTGTTGAAATAATAAAATCCCAAGATTTATCTGTAGTTTCTAAGGTTGTCAAAGTGACTATTGACTATACAGAAATTTCAT
TTATGCTTTGGTGTAAAGATGGCCATGTAGAAACATTTTACCCAAAATTACAATCTAGTCAAGCGTGGCAACCGGGTGTTG
CTATGCCTAATCTTTACAAAATGCAAAGAATGCTATTAGAAAAGTGTGACCTTCAAAATTATGGTGATAGTGCAACATTACC
TAAAGGCATAATGATGAATGTCGCAAAATATACTCAACTGTGTCAATATTTAAACACATTAACATTAGCTGTACCCTATAAT
ATGAGAGTTATACATTTTGGTGCTGGTTCTGATAAAGGAGTTGCACCAGGTACAGCTGTTTTAAGACAGTGGTTGCCTACG
GGTACGCTGCTTGTCGATTCAGATCTTAATGACTTTGTCTCTGATGCAGATTCAACTTTGATTGGTGATTGTGCAACTGTAC
ATACAGCTAATAAATGGGATCTCATTATTAGTGATATGTACGACCCTAAGACTAAAAATGTTACAAAAGAAAATGACTCTA
AAGAGGGTTTTTTCACTTACATTTGTGGGTTTATACAACAAAAGCTAGCTCTTGGAGGTTCCGTGGCTATAAAGATAACAG
AACATTCTTGGAATGCTGATCTTTATAAGCTCATGGGACACTTCGCATGGTGGACAGCCTTTGTTACTAATGTGAATGCGTC
ATCATCTGAAGCATTTTTAATTGGATGTAATTATCTTGGCAAACCACGCGAACAAATAGATGGTTATGTCATGCATGCAAAT
TACATATTTTGGAGGAATACAAATCCAATTCAGTTGTCTTCCTATTCTTTATTTGACATGAGTAAATTTCCCCTTAAATTAAG
GGGTACTGCTGTTATGTCTTTAAAAGAAGGTCAAATCAATGATATGATTTTATCTCTTCTTAGTAAAGGTAGACTTATAATT
AGAGAAAACAACAGAGTTGTTATTTCTAGTGATGTTCTTGTTAACAACTAAACGAACAATGTTTGTTTTTCTTGTTTTATTGC
CACTAGTCTCTATTCAGTGTGTTAATCTTACAACCAGAACTCAATTACCCCCTGCATACACTAATTCTTTCACACGTGGTGTT
TATTACCCTGACAAAGTTTTCAGATCCTCAGTTTTACATTCAACTCAGGACTTGTTCTTACCTTTCTTTTCCAATGTTACTTGG
TTCCATGCTATACATGTCTCTGGGACCAATGGTACTAAGAGGTTTGATAACCCTGTCCTACCATTTAATGATGGTGTTTATTT
TGCTTCCACTGAGAAGTCTAACATAATAAGAGGCTGGATTTTTGGTACTACTTTAGATTCGAAGACCCAGTCCCTACTTATT
GTTAATAACGCTACTAATGTTGTTATTAAAGTCTGTGAATTTCAATTTTGTAATGATCCATTTTTGGGTGTTTATTACCACAA
AAACAACAAAAGTTGTATGGAAAGTGAGTTCAGAGTTTATTCTAGTGCGAATAATTGCACTTTTGAATATGTCTCTCAGCCT
TTTCTTATGGACCTTGAAGGAAAACAGGGTAATTTCAAAAATCTTAGGGAATTTGTGTTTAAGAATATTGATGGTTATTTTA
AAATATATTCTAAGCACACGCCTATTAATTTAGTGCGTGATCTCCCTCAGGGTTTTTCGGCTTTAGAACCATTGGTAGATTT
GCCAATAGGTATTAACATCACTAGGTTTCAAACTTTACTTGCTTTACATAGAAGTTATTTGACTCCTGGTGATTCTTCTTCAG
GTTGGACAGCTGGTGCTGCAGCTTATTATGTGGGTTATCTTCAACCTAGGACTTTTCTATTAAAATATAATGAAAATGGAAC
CATTACAGATGCTGTAGACTGTGCACTTGACCCTCTCTCAGAAACAAAGTGTACGTTGAAATCCTTCACTGTAGAAAAAGG
AATCTATCAAACTTCTAACTTTAGAGTCCAACCAACAGAATCTATTGTTAGATTTCCTAATATTACAAACTTGTGCCCTTTTG
GTGAAGTTTTTAACGCCACCAGATTTGCATCTGTTTATGCTTGGAACAGGAAGAGAATCAGCAACTGTGTTGCTGATTATTC
TGTCCTATATAATTCCGCATCATTTTCCACTTTTAAGTGTTATGGAGTGTCTCCTACTAAATTAAATGATCTCTGCTTTACTAA
TGTCTATGCAGATTCATTTGTAATTAGAGGTGATGAAGTCAGACAAATCGCTCCAGGGCAAACTGGAAAGATTGCTGATTA
TAATTATAAATTACCAGATGATTTTACAGGCTGCGTTATAGCTTGGAATTCTAACAATCTTGATTCTAAGGTTGGTGGTAAT
TATAATTACCGGTATAGATTGTTTAGGAAGTCTAATCTCAAACCTTTTGAGAGAGATATTTCAACTGAAATCTATCAGGCCG
GTAGCACACCTTGTAATGGTGTTGAAGGTTTTAATTGTTACTTTCCTTTACAATCATATGGTTTCCAACCCACTAATGGTGTT
GGTTACCAACCATACAGAGTAGTAGTACTTTCTTTTGAACTTCTACATGCACCAGCAACTGTTTGTGGACCTAAAAAGTCTA
CTAATTTGGTTAAAAACAAATGTGTCAATTTCAACTTCAATGGTTTAACAGGCACAGGTGTTCTTACTGAGTCTAACAAAAA
GTTTCTGCCTTTCCAACAATTTGGCAGAGACATTGCTGACACTACTGATGCTGTCCGTGATCCACAGACACTTGAGATTCTT
GACATTACACCATGTTCTTTTGGTGGTGTCAGTGTTATAACACCAGGAACAAATACTTCTAACCAGGTTGCTGTTCTTTATC
AGGGTGTTAACTGCACAGAAGTCCCTGTTGCTATTCATGCAGATCAACTTACTCCTACTTGGCGTGTTTATTCTACAGGTTC
TAATGTTTTTCAAACACGTGCAGGCTGTTTAATAGGGGCTGAACATGTCAACAACTCATATGAGTGTGACATACCCATTGG
TGCAGGTATATGCGCTAGTTATCAGACTCAGACTAATTCTCCTCGGGGGCACGTAGTGTAGCTAGTCAATCCATCATTGC
CTACACTATGTCACTTGGTGCAGAAAATTCAGTTGCTTACTCTAATAACTCTATTGCCATACCCACAAATTTTACTATTAGTG
TTACCACAGAAATTCTACCAGTGTCTATGACCAAGACATCAGTAGATTGTACAATGTACATTTGTGGTGATTCAACTGAATG
CAGCAATCTTTTGTTGCAATATGGCAGTTTTTGTACACAATTAAACCGTGCTTTAACTGGAATAGCTGTTGAACAAGACAAA
AACACCCAAGAAGTTTTTGCACAAGTCAAACAAATTTACAAAACACCACCAATTAAAGATTTTGGTGGTTTTAATTTTTCAC
AAATATTACCAGATCCATCAAAACCAAGCAAGAGGTCATTTATTGAAGATCTACTTTTCAACAAAGTGACACTTGCAGATG
CTGGCTTCATCAAACAATATGGTGATTGCCTTGGTGATATTGCTGCTAGAGACCTCATTTGTGCACAAAAGTTTAACGGCCT
TACTGTTTTGCCACCTTTGCTCACAGATGAAATGATTGCTCAATACACTTCTGCACTGTTAGCGGGTACAATCACTTCTGGTT
GGACCTTTGGTGCAGGTGCTGCATTACAAATACCATTTGCTATGCAAATGGCTTATAGGTTTAATGGTATTGGAGTTACAC
AGAATGTTCTCTATGAGAACCAAAAATTGATTGCCAACCAATTTAATAGTGCTATTGGCAAAATTCAAGACTCACTTTCTTC
CACAGCAAGTGCACTTGGAAAACTTCAAGATGTGGTCAACCAAAATGCACAAGCTTTAAACACGCTTGTTAAACAACTTAG
CTCCAATTTTGGTGCAATTTCAAGTGTTTTAAATGATATCCTTTCACGTCTTGACAAAGTTGAGGCTGAAGTGCAAATTGAT
AGGTTGATCACAGGCAGACTTCAAAGTTTGCAGACATATGTGACTCAACAATTAATTAGAGCTGCAGAAATCAGAGCTTCT
GCTAATCTTGCTGCTACTAAAATGTCAGAGTGTGTACTTGGACAATCAAAAAGAGTTGATTTTTGTGGAAAGGGCTATCAT
CTTATGTCCTTCCCTCAGTCAGCACCTCATGGTGTAGTCTTCTTGCATGTGACTTATGTCCCTGCACAAGAAAAGAACTTCAC
AACTGCTCCTGCCATTTGTCATGATGGAAAAGCACACTTTCCTCGTGAAGGTGTCTTTGTTTCAAATGGCACACACTGGTTT
GTAACACAAAGGAATTTTTATGAACCACAAATCATTACTACAGACAACACATTTGTGTCTGGTAACTGTGATGTTGTAATAG
GAATTGTCAACAACACAGTTTATGATCCTTTGCAACCTGAATTAGACTCATTCAAGGAGGAGTTAGATAAATATTTTAAGAA
TCATACATCACCAGATGTTGATTTAGGTGACATCTCTGGCATTAATGCTTCAGTTGTAAACATTCAAAAAGAAATTGACCGC
CTCAATGAGGTTGCCAAGAATTTAAATGAATCTCTCATCGATCTCCAAGAACTTGGAAAGTATGAGCAGTATATAAAATGG
CCATGGTACATTTGGCTAGGTTTTATAGCTGGCTTGATTGCCATAGTAATGGTGACAATTATGCTTTGCTGTATGACCAGTT
GCTGTAGTTGTCTCAAGGGCTGTTGTTCTTGTGGATCCTGCTGCAAATTTGATGAAGACGACTCTGAGCCAGTGCTCAAAG
GAGTCAAATTACATTACACATAAACGAACTTATGGATTTGTTTATGAGAATCTTCACAATTGGAACTGTAACTTTGAAGCAA
GGTGAAATCAAGGATGCTACTCCTTCAGATTTTGTTCGCGCTACTGCAACGATACCGATACAAGCCTCACTCCCTTTCGGAT
GGCTTATTGTTGGCGTTGCACTTCTTGCTGTTTTTCATAGCGCTTCCAAAATCATAACCCTCAAAAAGAGATGGCAACTAGC
ACTCTCCAAGGGTGTTCACTTTGTTTGCAACTTGCTGTTGTTGTTTGTAACAGTTTACTCACACCTTTTGCTCGTTGCTGCTG
GCCTTGAAGCCCCTTTTCTCTATCTTTATGCTTTAGTCTACTTCTTGCAGAGTATAAACTTTGTAAGAATAATAATGAGGCTT
TGGCTTTGCTGGAAATGCCGTTCCAAAAACCCATTACTTTATGATGCCAACTATTTTCTTTGCTGGCATACTAATTGTTACGA
CTATTGTATACCTTACAATAGTGTAACTTCTTCAATTGTCATTACTTCAGGTGATGGCACAACAAGTCCTATTTCTGAACATG
ACTACCAGATTGGTGGTTATACTGAAAAATGGGAATCTGGAGTAAAAGACTGTGTTGTATTACACAGTTACTTCACTTCAG
ACTATTACCAGCTGTACTCAACTCAATTGAGTACAGACACTGGTGTTGAACATGTTACCTTCTTCATCTACAATAAAATTGTT
GATGAGCCTGAAGAACATGTCCAAATTCACACAATCGACGGTTCATCCGGAGTTGTTAATCCAGTAATGGAACCAATTTAT
GATGAACCGACGACGACTACTAGCGTGCCTTTGTAAGCACAAGCTGATGAGTACGAACTTATGTACTCATTCGTTTCGGAA
GAGACAGGTACGTTAATAGTTAATAGCGTACTTCTTTTTCTTGCTTTCGTGGTATTCTTGCTAGTTACACTAGCCATCCTTAC
TGCGCTTCGATTGTGTGCGTACTGCTGCAATATTGTTAACGTGAGTCTTGTAAAACCTTCTTTTTACGTTTACTCTCGTGTTA
AAAATCTGAATTCTTCTAGAGTTCCTGATCTTCTGGTCTAAACGAACTAAATATTATATTAGTTTTTCTGTTTGGAACTTTAAT
TTTAGCCATGGTAGATTCCAACGGTACTATTACCGTTGAAGAGCTTAAAAAGCTCCTTGAACAATGGAACCTAGTAATAGG
TTTCCTATTCCTTACATGGATTTGTCTTCTACAATTTGCCTATGCCAACAGGAATAGGTTTTTGTATATAATTAAGTTAATTTT
TCTCTGGCTGTTATGGCCAGTAACTTTAGCTTGTTTTGTGCTTGCTGCTGTTTACAGAATAAATTGGATCACCGGTGGAATT
GCTATCGCAATGGCTTGTCTTGTAGGCTTGATGTGGCTCAGCTACTTCATTGCTTCTTTCAGACTGTTTGCGCGTACGCGTT
CCATGTGGTCATTCAATCCAGAAACTAACATTCTTCTCAACGTGCCACTCCATGGCACTATTCTGACCAGACCGCTTCTAGA
AAGTGAACTCGTAATCGGAGCTGTGATCCTTCGTGGACATCTTCGTATTGCTGGACACCATCTAGGACGCTGTGACATCAA
GGACCTGCCTAAAGAAATCACTGTTGCTACATCACGAACGCTTTCTTATTACAAATTGGGAGCTTCGCAGCGTGTAGCAGG
TGACTCAGGTTTTGCTGCATACAGTCGCTACAGGATTGGCAACTATAAATTAAACACAGACCATTCCAGTAGCAGTGACAA
TATTGCTTTGCTTGTACAGTAAGTGACAACAGATGTTTCATCTCGTTGACTTTCAGGTTACTATAGCAGAGATATTACTAATT
ATTATGAGGACTTTTAAAGTTTCCATTTGGAATCTTGATTACATCATAAACCTCATAATTAAAAATTTATCTAAGTCACTAAC
TGAGAATAAATATTCTCAATTAGATGAAGAGCAACCAATGGAGATTGATTAAACGAACATGAAAATTATTCTTTTCTTGGC
ACTGATAACACTCGCTACTTGTGAGCTTTATCACTACCAAGAGTGTGTTAGAGGTACAACAGTACTTTTAAAAGAACCTTGC
TCTTCTGGAACATACGAGGGCAATTCACCATTTCATCCTCTAGCTGATAACAAATTTGCACTGACTTGCTTTAGCACTCAATT
TGCTTTTGCTTGTCCTGACGGCGTAAAACACGTCTATCAGTTACGTGCCAGATCAGTTTCACCTAAACTGTTCATCAGACAA
GAGGAAGTTCAAGAACTTTACTCTCCAATTTTTCTTATTGTTGCGGCAATAGTGTTTATAACACTTTGCTTCACACTCAAAAG
AAAGACAGAATGATTGAACTTTCATTAATTGACTTCTATTTGTGCTTTTTAGCCTTTCTGCTATTCCTTGTTTTAATTATGCTT
ATTATCTTTTGGTTCTCACTTGAACTGCAAGATCATAATGAAACTTGTCACGCCTAAACGAACATGAAATTTCTTGTTTTCTT
AGGAATCATCACAACTGTAGCTGCATTTCACCAAGAATGTAGTTTACAGTCATGTACTCAACATCAACCATATGTAGTTGAT
GACCCGTGTCCTATTCACTTCTATTCTAAATGGTATATTAGAGTAGGAGCTAGAAAATCAGCACCTTTAATTGAATTGTGCG
TGGATGAGGCTGGTTCTAAATCACCCATTCAGTACATCGATATCGGTAATTATACAGTTTCCTGTTTACCTTTTACAATTAAT
TGCCAGGAACCTÅAATTGGGTÅGTCTTGTAGTGCGTTGTTCGTTCTATGAAGACTTTTTAGAGTATCATGACGTTCGTGTTG
TTTTAGATTTCATCTAAACGAACAAACTATAATGTCTGATAATGGACCCCAAAATCAGCGAAATGCACCCCGCATTACGTTT
GGTGGACCCTCAGATTCAACTGGCAGTAACCAGAATGGAGAACGCAGTGGGGCGCGATCAAAACAACGTCGGCCCCAAG
GTTTACCCAATAATACTGCGTCTTGGTTCACCGCTCTCACTCAACATGGCAAGGAAGACCTTAAATTCCCTCGAGGACAAG
GCGTTCCAATTAACACCAATAGCAGTCCAGATGACCAAATTGGCTACTACCGAAGAGCTACCAGACGAATTCGTGGTGGT
GACGGTAAAATGAAAGATCTCAGTCCAAGATGGTATTTCTACTACCTAGGAACTGGGCCAGAAGCTGGACTTCCCTATGGT
GCTAACAAAGACGGCATCATATGGGTTGCAACTGAGGGAGCCTTGAATACACCAAAAGATCACATTGGCACCCGCAATCC
TGCTAACAATGCTGCAATCGTGCTACAACTTCCTCAAGGAACAACATTGCCAAAAGGCTTCTACGCAGAAGGGAGCAGAG
GCGGCAGTCAAGCCTCTTCTCGTTCCTCATCACGTAGTCGCAACAGTTCAAGAAATTCAACTCCAGGCAGCAGTAGGGGAA
TTTCTCCTGCTAGAATGGCTGGCAATGGCGGTGATGCTGCTCTTGCTTTGCTGCTGCTTGACAGATTGAACCAGCTTGAGA
GCAAAATGTCTGGTAAAGGCCAACAACAACAAGGCCAAACTGTCACTAAGAAATCTGCTGCTGAGGCTTCTAAGAAGCCT
CGGCAAAAACGTACTGCCACTAAAGCATACAATGTAACACAAGCTTTCGGCAGACGTGGTCCAGAACAAACCCAAGG
AAATTTTGGGGACCAGGAACTAATCAGACAAGGAACTGATTACAAACATTGGCCGCAAATTGCACAATTTGCCCCCAGCG
CTTCAGCGTTCTTCGGAATGTCGCGCATTGGCATGGAAGTCACACCTTCGGGAACGTGGTTGACCTACACAGGTGCCATCA
AATTGGATGACAAAGATCCAAATTTCAAAGATCAAGTCATTTTGCTGAATAAGCATATTGACGCATACAAAACATTTCCACC
AACAGAGCCTAAAAAGGACAAAAAGAAGAAGGCTGATGAAACTCAAGCCTTACCGCAGAGACAGAAGAAACAGCAAACT
GTGACTCTTCTTCCTGCTGCAGATTTGGATGATTTCTCCAAACAATTGCAACAATCCATGAGCAGTGCTGACTCAACTCAGG
CCTAAACTCATGCAGACCACACAAGGCAGATGGGCTATATAAACGTTTTCGCTTTTCCGTTTACGATATATAGTCTACTCTT
GTGCAGAATGAATTCTCGTAACTACATAGCACAAGTAGATGTAGTTAACTTTAATCTCACATAGCAATCTTTAATCAGTGTG
TAACATTAGGGAGGACTTGAAAGAGCCACCACATTTTCACCGAGGCCACGCGGAGTACGATCGAGTGTACAGTGAACAAT
GCTAGGGAGAGCTGCCTATATGGAAGAGCCCTAATGTGTAAAATTAATTTTAGTAGTGCTATCC
SEQ ID NO: 25
>QQV21856.1: S surface protein
MFVFLVLLPLVSIQCVNLTTRTQLPPAYTNSFTRGVYYPDKVFRSSVLHSTQDLFLPFFSNVTWFHAIHVSGTNGTKRFDNPVLPF
NDGVYFASTEKSNIIRGWIFGTTLDSKTQSLLIVNNATNVVIKVCEFQFCNDPFLGVYYHKNNKSCMESEFRVYSSANNCTFEYVS
QPFLMDLEGKQGNFKNLREFVFKNIDGYFKIYSKHTPINLVRDLPQGFSALEPLVDLPIGINITRFQTLLALHRSYLTPGDSSSGWT
AGAAAYYVGYLQPRTFLLKYNENGTITDAVDCALDPLSETKCTLKSFTVEKGIYQTSNFRVQPTESIVRFPNITNLCPFGEVFNATR
FASVYAWNRKRISNCVADYSVLYNSASFSTFKCYGVSPTKLNDLCFTNVYADSFVIRGDEVRQIAPGQTGKIADYNYKLPDDFTG
CVIAWNSNNLDSKVGGNYNYRYRLFRKSNLKPFERDISTEIYQAGSTPCNGVEGFNCYFPLQSYGFQPTNGVGYQPYRVVVLSF
ELLHAPATVCGPKKSTNLVKNKCVNFNFNGLTGTGVLTESNKKFLPFQQFGRDIADTTDAVRDPQTLEILDITPCSFGGVSVITPG
TNTSNQVAVLYQGVNCTEVPVAIHADQLTPTWRVYSTGSNVFQTRAGCLIGAEHVNNSYECDIPIGAGICASYQTQTNSPRRAR
SVASQSIIAYTMSLGAENSVAYSNNSIAIPTNFTISVTTEILPVSMTKTSVDCTMYICGDSTECSNLLLQYGSFCTQLNRALTGIAVE
QDKNTQEVFAQVKQIYKTPPIKDFGGFNFSQILPDPSKPSKRSFIEDLLFNKVTLADAGFIKQYGDCLGDIAARDLICAQKFNGLTV
LPPLLTDEMIAQYTSALLAGTITSGWTFGAGAALQIPFAMQMAYRFNGIGVTQNVLYENQKLIANQFNSAIGKIQDSLSSTASAL
GKLQDVVNQNADALNTLVKQLSSNFGAISSVLNDILSRLDKVEAEVQIDRLITGRLQSLQTYVTQQLIRAAEIRASANLAATKMSE
CVLGQSKRVDFCGKGYHLMSFPQSAPHGVVFLHVTYVPAQEKNFTTAPAICHDGKAHFPREGVFVSNGTHWFVTQRNFYEPQ
IITTDNTFVSGNCDVVIGIVNNTVYDPLQPELDSFKEELDKYFKNHTSPDVDLGDISGINASVVNIQKEIDRLNEVAKNLNESLIDL
QELGKYEQYIKWPWYIWLGFIAGLIAIVMVTIMLCCMTSCCSCLKGCCSCGSCCKFDEDDSEPVLKGVKLHYT
SEQ ID NO: 26
>MW306426.1 Severe acute respiratory syndrome coronavirus 2 isolate SARS-CoV-2/human/USA/CA-CZB-
12872/2020, complete genome. [Severe acute respiratory syndrome coronavirus 2 (SARS-CoV-2)].
Californian B.1.429 lineage
ACTTTCGATCTCTTGTAGATCTGTTCTCTAAACGAACTTTAAAATCTGTGTGGCTGTCACTCGGCTGCATGCTTAGTGCACTC
ACGCAGTATAATTAATAACTAATTACTGTCGTTGACAGGACACGAGTAACTCGTCTATCTTCTGCAGGCTGCTTACGGTTTC
GTCCGTGTTGCAGCCGATCATCAGCACATCTAGGTTTTGTCCGGGTGTGACCGAAAGGTAAGATGGAGAGCCTTGTCCCT
GGTTTCAACGAGAAAACACACGTCCAACTCAGTTTGCCTGTTTTACAGGTTCGCGACGTGCTCGTACGTGGCTTTGGAGAC
TCCGTGGAGGAGGTCTTATCAGAGGCACGTCAACATCTTAAAGATGGCACTTGTGGCTTAGTAGAAGTTGAAAAAGGCGT
TTTGCCTCAACTTGAACAGCCCTATGTGTTCATCAAACGTTCGGATGCTCGAACTGCACCTCATGGTCATGTTATGGTTGAG
CTGGTAGCAGAACTCGAAGGCATTCAGTACGGTCGTAGTGGTGAGACACTTGGTGTCCTTGTCCCTCATGTGGGCGAAAT
ACCAGTGGCTTACCGCAAGGTTCTTCTTCGTAAGAACGGTAATAAAGGAGCTGGTGGCCATAGTTACGGCGCCGATCTAA
AGTCATTTGACTTAGGCGACGAGCTTGGCACTGATCCTTATGAAGATTTTCAAGAAAACTGGAACACTAAACATAGCAGTG
GTGTTACCCGTGAACTCATGCGTGAGCTTAACGGAGGGGCATACACTCGCTATGTCGATAACAACTTCTGTGGCCCTGATG
GCTACCCTCTTGAGTGCATTAAAGACCTTCTAGCACGTGCTGGTAAAGCTTCATGCACTTTGTCCGAACAACTGGACTTTAT
TGACACTAAGAGGGGTGTATACTGCTGCCGTGAACATGAGCATGAAATTGCTTGGTACACGGAACGTTCTGAAAAGAGCT
ATGAATTGCAGACACCTTTTGAAATTAAATTGGCAAAGAAATTTGACATCTTCAATGGGGAATGTCCAAATTTTGTATTTCC
CTTAAATTCCATAATCAAGACTATTCAACCAAGGGTTGAAAAGAAAAAGCTTGATGGCTTTATGGGTAGAATTCGATCTGT
CTATCCAGTTGCGTCACCAAATGAATGCAACCAAATGTGCCTTTCAACTCTCATGAAGTGTGATCATTGTGGTGAAACTTCA
TGGCAGACGGGCGATTTTGTTAAAGCCACTTGCGAATTTTGTGGCACTGAGAATTTGACTAAAGAAGGTGCCACTACTTGT
GGTTACTTACCCCAAAATGCTGTTGTTAAAATTTATTGTCCAGCATGTCACAATTCAGAAGTAGGACCTGAGCATAGTCTTG
CCGAATACCATAATGAATCTGGCTTGAAAACCATTCTTCGTAAGGGTGGTCGCACTATTGCCTTTGGAGGCTGTGTGTTCTC
TTATGTTGGTTGCCATAACAAGTGTGCCTATTGGGTTCCACGTGCTAGCGCTAACATAGGTTGTAACCATACAGGTGTTGTT
GGAGAAGGTTCCGAAGGTCTTAATGACAACCTTCTTGAAATACTCCAAAAAGAGAAAGTCAACATCAATATTGTTGGTGAC
TTTAAACTTAATGAAGAGATCGCCATTATTTTGGCATCTTTTTCTGCTTCCACAAGTGCTTTTGTGGAAACTGTGAAAGGTTT
GGATTATAAAGCATTCAAACAAATTGTTGAATCCTGTGGTAATTTTAAAGTTACAAAAGGAAAAGCTAAAAAAGGTGCCTG
GAATATTGGTGAACAGAAATCAATACTGAGTCCTCTTTATGCATTTGCATCAGAGGCTGCTCGTGTTGTACGATCAATTTTC
TCCCGCACTCTTGAAACTGCTCAAAATTCTGTGCGTGTTTTACAGAAGGCCGCTATAACAATACTAGATGGAATTTCACAGT
ATTCACTGAGACTCATTGATGCTATGATGTTCACATCTGATTTGGCTACTAACAATCTAGTTGTAATGGCCTACATTACAGG
TGGTGTTGTTCAGTTGACTTCGCAGTGGCTAACTAACATCTTTGGCACTGTTTATGAAAAACTCAAACCCGTCCTTGATTGG
CTTGAAGAGAAGTTTAAGGAAGGTGTAGAGTTTCTTAGAGACGGTTGGGAAATTGTTAAATTTATCTCAACCTGTGCTTGT
GAAATTGTCGGTGGACAAATTGTCACCTGTGCAAAGGAAATTAAGGAGAGTGTTCAGACATTCTTTAAGCTTGTAAATAAA
TTTTTGGCTTTGTGTGCTGACTCTATCATTATTGGTGGAGCTAAACTTAAAGCCTTGAATTTAGGTGAAACATTTGTTACGC
ACTCAAAGGGATTGTACAGAAAGTGTGTTAAATCCAGAGAAGAAACTGGCCTACTCATGCCTCTAAAAGCCCCAAAAGAA
ATTATCTTCTTAGAGGGAGAAACACTTCCCACAGAAGTGTTAACAGAGGAAGTTGTCTTGAAAACTGGTGATTTACAACCA
TTAGAACAACCTACTAGTGAAGCTGTTGAAGCTCCACTGGTTGGTACACCAGTTTGTATTAACGGGCTTATGTTGCTCGAA
ATCAAAGACACAGAAAAGTACTGTGCCCTTGCACCTAATATGATGGTAACAAACAATACCTTCACACTCAAAGGCGGTGCA
CCAACAAAGGTTACTTTTGGTGATGACACTGTGATAGAAGTGCAAGGTTACAAGAGTGTGAATATCACTTTTGAACTTGAT
GAAAGGATTGATAAAGTACTTAATGAGAAGTGCTCTGCCTATACAGTTGAACTCGGTACAGAAGTAAATGAGTTCGCCTGT
GTTGTGGCAGATGCTGTCATAAAAACTTTGCAACCAGTATCTGAATTACTTACACCACTGGGCATTGATTTAGATGAGTGG
AGTATGGCTACATACTACTTATTTGATGAGTCTGGTGAGTTTAAATTGGCTTCACATATGTATTGTTCTTTTTACCCTCCAGA
TGAGGATGAAGAAGAAGGTGATTGTGAAGAAGAAGAGTTTGAGCCATCAACTCAATATGAGTATGGTACTGAAGATGAT
TACCAAGGTAAACCTTTGGAATTTGGTGCCACTTCTGCTGCTCTTCAACCTGAAGAAGAGCAAGAAGAAGATTGGTTAGAT
GATGATAGTCAACAAACTGTTGGTCAACAAGACGGCAGTGAGGACAATCAGACAACTACTATTCAAACAATTGTTGAGGT
TCAACCTCAATTAGAGATGGAACTTACACCAGTTGTTCAGACTATTGAAGTGAATAGTTTTAGTGGTTATTTAAAACTTACT
GACAATGTATACATTAAAAATGCAGACATTGTGGAAGAAGCTAAAAAGGTAAAACCAACAGTGGTTGTTAATGCAGCCAA
TGTTTACCTTAAACATGGAGGAGGTGTTGCAGGAGCCTTAAATAAGGCTACTAACAATGCCATGCAAGTTGAATCTGATGA
TTACATAGCTACTAATGGACCACTTAAAGTGGGTGGTAGTTGTGTTTTAAGCGGACACAATCTTGCTAAACACTGTCTTCAT
GTTGTCGGCCCAAATGTTAACAAAGGTGAAGACATTCAACTTCTTAAGAGTGCTTATGAAAATTTTAATCAGCACGAAGTT
CTACTTGCACCATTATTATCAGCTGGTATTTTTGGTGCTGACCCTATACATTCTTTAAGAGTTTGTGTAGATACTGTTCGCAC
AAATGTCTACTTAGCTGTCTTTGATAAAAATCTCTATGACAAACTTGTTTCAAGCTTTTTGGAAATGAAGAGTGAAAAGCAA
GTTGAACAAAAGATCGCTGAGATTCCTAAAGAGGAAGTTAAGCCATTTATAACTGAAAGTAAACCTTCAGTTGAACAGAG
AAAACAAGATGATAAGAAAATCAAAGCTTGTGTTGAAGAAGTTACAACAACTCTGGAAGAAACTAAGTTCCTCACAGAAA
ACTTGTTACTTTATATTGACATTAATGGCAATCTTCATCCAGATTCTGCCACTCTTGTTAGTGACATTGACATCACTTTCTTAA
AGAAAGATGCTCCATATATAGTGGGTGATGTTGTTCAAGAGGGTGTTTTAACTGCTGTGGTTATACCTACTAAAAAGGCTG
GTGGCACTACTGAAATGCTAGCGAAAGCTTTGAGAAAAGTGCCAACAGACAATTATATAACCACTTACCCGGGTCAGGGT
TTAAATGGTTACACTGTAGAGGAGGCAAAGACAGTGCTTAAAAAGTGTAAAAGTGCCTTTTACATTCTACCATCTATTATCT
CTAATGAGAAGCAAGAAATTCTTGGAACTGTTTCTTGGAATTTGCGAGAAATGCTTGCACATGCAGAAGAAACACGCAAA
TTAATGCCTGTCTGTGTGGAAACTAAAGCCATAGTTTCAACTATACAGCGTAAATATAAGGGTATTAAAATACAAGAGGGT
GTGGTTGATTATGGTGCTAGATTTTACTTTTACACCAGTAAAACAACTGTAGCGTCACTTATCAACACACTTAACGATCTAA
ATGAAACTCTTGTTACAATGCCACTTGGCTATGTAACACATGGCTTAAATTTGGAAGAAGCTGCTCGGTATATGAGATCTCT
CAAAGTGCCAGCTACAGTTTCTGTTTCTTCACCTGATGCTGTTACAGCGTATAATGGTTATCTTACTTCTTCTTCTAAAACAC
CTGAAGAACATTTTATTGAAACCATCTCACTTGCTGGTTCCTATAAAGATTGGTCCTATTCTGGACAATCTACACAACTAGG
TATAGAATTTCTTAAGAGAGGTGATAAAAGTGTATATTACACTAGTAATCCTACCACATTCCACCTAGATGGTGAAGTTATC
ACCTTTGACAATCTTAAGACACTTCTTTCTTTGAGAGAAGTGAGGACTATTAAGGTGTTTACAACAGTAGACAACATTAACC
TCCACACGCAAGTTGTGGACATGTCAATGACATATGGACAACAGTTTGGTCCAACTTATTTGGATGGAGCTGATGTTACTA
AAATAAAACCTCATAATTCACATGAAGGTAAAACATTTTATGTTTTACCTAATGATGACACTCTACGTGTTGAGGCTTTTGA
GTACTACCACACAACTGATCCTAGTTTTCTGGGTAGGTACATGTCAGCATTAAATCACACTAAAAAGTGGAAATACCCACA
AGTTAATGGTTTAACTTCTATTAAATGGGCAGATAACAACTGTTATCTTGCCACTGCATTGTTAACACTCCAACAAATAGAG
TTGAAGTTTAATCCACCTGCTCTACAAGATGCTTATTACAGAGCAAGGGCTGGTGAAGCTGCTAACTTTTGTGCACTTATCT
TAGCCTACTGTAATAAGACAGTAGGTGAGTTAGGTGATGTTAGAGAAACAATGAGTTACTTGTTTCAACATGCCAATTTAG
ATTCTTGCAAAAGAGTCTTGAACGTGGTGTGTAAAACTTGTGGACAACAGCAGACAACCCTTAAGGGTGTAGAAGCTGTT
ATGTACATGGGCACACTTTCTTATGAACAATTTAAGAAAGGTGTTCAGATACCTTGTACGTGTGGTAAACAAGCTACAAAA
TATCTAGTACAACAGGAGTCACCTTTTGTTATGATGTCAGCACCACCTGCTCAGTATGAACTTAAGCATGGTACATTTACTT
GTGCTAGTGAGTACACTGGTAATTACCAGTGTGGTCACTATAAACATATAACTTCTAAAGAAACTTTGTATTGCATAGACG
GTGCTTTACTTACAAAGTCCTCAGAATACAAAGGTCCTATTACGGATGTTTTCTACAAAGAAAACAGTTACACAACAACCAT
AAAACCAGTTACTTATAAATTGGATGGTGTTGTTTGTACAGAAATTGACCCTAAGTTGGACAATTATTATAAGAAAGACAA
TTCTTATTTCACAGAGCAACCAATTGATCTTGTACCAAACCAACCATATCCAAACGCAAGCTTCGATAATTTTAAGTTTGTA
TGTGATAATATCAAATTTGCTGATGATTTAAACCAGTTAACTGGTTATAAGAAACCTGCTTCAAGAGAGCTTAAAGTTACAT
TTTTCCCTGACTTAAATGGTGATGTGGTGGCTATTGATTATAAACACTACACACCCTCTTTTAAGAAAGGAGCTAAATTGTT
ACATAAACCTATTGTTTGGCATGTTAACAATGCAACTAATAAAGCCACGTATAAACCAAATACCTGGTGTATACGTTGTCTT
TGGAGCACAAAACCAGTTGAAACATCAAATTCGTTTGATGTACTGAAGTCAGAGGACGCGCAGGGAATGGATAATCTTGC
CTGCGAAGATCTAAAACCAGTCTCTGAAGAAGTAGTGGAAAATCCTACCATACAGAAAGACGTTCTTGAGTGTAATGTGA
AAACTACCGAAGTTGTAGGAGACATTATACTTAAACCAGCAAATAATAGTTTAAAAATTACAGAAGAGGTTGGCCACACA
GATCTAATGGCTGCTTATGTAGACAATTCTAGTCTTACTATTAAGAAACCTAATGAATTATCTAGAGTATTAGGTTTGAAAA
CCCTTGCTACTCATGGTTTAGCTGCTGTTAATAGTGTCCCTTGGGATACTATAGCTAATTATGCTAAGCCTTTTCTTAACAAA
GTTGTTAGTACAACTACTAACATAGTTACACGGTGTTTAAACCGTGTTTGTACTAATTATATGCCTTATTTCTTTACTTTATTG
CTACAATTGTGTACTTTTACTAGAAGTACAAATTCTAGAATTAAAGCATCTATGCCGACTACTATAGCAAAGAATACTGTTA
AGAGTGTCGGTAAATTTTGTCTAGAGGCTTCATTTAATTATTTGAAGTCACCTAATTTTTCTAAACTGATAAATATTATAATT
TGGTTTTTACTATTAAGTGTTTGCCTAGGTTCTTTAATCTACTCAACCGCTGCTTTAGGTGTTTTAATGTCTAATTTAGGCAT
GCCTTCTTACTGTACTGGTTACAGAGAAGGCTATTTGAACTCTACTAATGTCACTATTGCAACCTACTGTACTGGTTCTATAC
CTTGTAGTGTTTGTCTTAGTGGTTTAGATTCTTTAGACACCTATCCTTCTTTAGAAACTATACAAATTACCATTTCATCTTTTA
AATGGGATTTAACTGCTTTTGGCTTAGTTGCAGAGTGGTTTTTGGCATATATTCTTTTCACTAGGTTTTTCTATGTACTTGGA
TTGGCTGCAATCATGCAATTGTTTTTCAGCTATTTTGCAGTACATTTTATTAGTAATTCTTGGCTTATGTGGTTAATAATTAAT
CTTGTACAAATGGCCCCGATTTCAGCTATGGTTAGAATGTACATCTTCTTTGCATCATTTTATTATGTATGGAAAAGTTATGT
GCATGTTGTAGACGGTTGTAATTCATCAACTTGTATGATGTGTTACAAACGTAATAGAGCAACAAGAGTCGAATGTACAAC
TATTGTTAATGGTGTTAGAAGGTCCTTTTATGTCTATGCTAATGGAGGTAAAGGCTTTTGCAAACTACACAATTGGAATTGT
GTTAATTGTGATACATTCTGTGCTGGTAGTACATTTATTAGTGATGAAGTTGCGAGAGACTTGTCACTACAGTTTAAAAGAC
CAATAAATCCTACTGACCAGTCTTCTTACATCGTTGATAGTGTTACAGTGAAGAATGGTTCCATCCATCTTTACTTTGATAAA
GCTGGTCAAAAGACTTATGAAAGACATTCTCTCTCTCATTTTGTTAACTTAGACAACCTGAGAGCTAATAACACTAAAGGTT
CATTGCCTATTAATGTTATAGTTTTTGATGGTAAATCAAAATGTGAAGAATCATCTGCAAAATCAGCGTCTGTTTACTACAG
TCAGCTTATGTGTCAACCTATACTGTTACTAGATCAGGCATTAGTGTCTGATGTTGGTGATAGTGCGGAAGTTGCAGTTAA
AATGTTTGATGCTTACGTTAATACGTTTTCATCAACTTTTAACGTACCAATGGAAAAACTCAAAACACTAGTTGCAACTGCA
GAAGCTGAACTTGCAAAGAATGTGTCCTTAGACAATGTCTTATCTACTTTTATTTCAGCAGCTCGGCAAGGGTTTGTTGATT
CAGATGTAGAAACTAAAGATGTTGTTGAATGTCTTAAATTGTCACATCAATCTGACATAGAAGTTACTGGCGATAGTTGTÅ
ATAACTATATGCTCACCTATAACAAAGTTGAAAACATGACACCCCGTGACCTTGGTGCTTGTATTGACTGTAGTGCGCGTCA
TATTAATGCGCAGGTAGCAAAAAGTCACAACATTGCTTTGATATGGAACGTTAAAGATTTCATGTCATTGTCTGAACAACTA
CGAAAACAAATACGTAGTGCTGCTAAAAAGAATAACTTACCTTTTAAGTTGACATGTGCAACTACTAGACAAGTTGTTAAT
GTTGTAACAACAAAGATAGCACTTAAGGGTGGTAAAATTGTTAATAATTGGTTGAAGCAGTTAATTAAAGTTACACTTGTG
TTCCTTTTTGTTGCTGCTATTTTCTATTTAATAACACCTGTTCATGTCATGTCTAAACATACTGACTTTTCAAGTGAAATCATA
GGATACAAGGCTATTGATGGTGGTGTCACTCGTGACATAGCATCTACAGATACTTGTTTTGCTAACAAACATGCTGATTTTG
ACACATGGTTTAGCCAGCGTGGTGGTAGTTATACTAATGACAAAGCTTGCCCATTGATTGCTGCAGTCATAACAAGAGAAG
TGGGTTTTGTCGTGCCTGGTTTGCCTGGCACGATATTACGCACAACTAATGGTGACTTTTTGCATTTCTTACCTAGAGTTTTT
AGTGCAGTTGGTAATATCTGTTACACACCATCAAAACTTATAGAGTACACTGACTTTGCAACATCAGCTTGTGTTTTGGCTG
CTGAATGTACAATTTTTAAAGATGCTTCTGGTAAGCCAGTACCATATTGTTATGATACCAATGTACTAGAAGGTTCTGTTGC
TTATGAAAGTTTACGCCCTGACACACGTTATGTGCTCATGGATGGCTCTATTATTCAATTTCCTAACACCTACCTTGAAGGTT
CTGTTAGAGTGGTAACAACTTTTGATTCTGAGTACTGTAGGCACGGCACTTGTGAAAGATCAGAAGCTGGTGTTTGTGTAT
CTACTAGTGGTAGATGGGTACTTAACAATGATTATTACAGATCTTTACCAGGAGTTTTCTGTGGTGTAGATGCTGTAAATTT
ACTTACTAATATGTTTACACCACTAATTCAACCTATTGGTGCTTTGGACATATCAGCATCTATAGTAGCTGGTGGTATTGTA
GCTATCGTAGTAACATGCCTTGCCTACTATTTTATGAGGTTTAGAAGAGCTTTTGGTGAATACAGTCATGTAGTTGCCTTTA
ATACTTTACTATTCCTTATGTCATTCACTGTACTCTGTTTAACACCAGTTTACTCATTCTTACCTGGTGTTTATTCTGTTATTTA
CTTGTACTTGACATTTTATCTTACTAATGATGTTTCTTTTTTAGCACATATTCAGTGGATGGTTATGTTCACACCTTTAGTACC
TTTCTGGATAACAATTGCTTATATCATTTGTATTTCCACAAAGCATTTCTATTGGTTCTTTAGTAATTACCTAAAGAGACGTG
TAGTCTTTAATGGTGTTTCCTTTAGTACTTTTGAAGAAGCTGCGCTGTGCACCTTTTTGTTAAATAAAGAAATGTATCTAAAG
TTGCGTAGTGATGTGCTATTACCTCTTACGCAATATAATAGATACTTAGCTCTTTATAATAAGTACAAGTATTTTAGTGGAG
CAATGGATACAACTAGCTACAGAGAAGCTGCTTGTTGTCATCTCGCAAAGGCTCTCAATGACTTCAGTAACTCAGGTTCTG
ATGTTCTTTACCAACCACCACAAACCTCTATCACCTCAGCTGTTTTGCAGAGTGGTTTTAGAAAAATGGCATTCCCATCTGGT
AAAGTTGAGGGTTGTATGGTACAAGTAACTTGTGGTACAACTACACTTAACGGTCTTTGGCTTGATGACGTAGTTTACTGT
CCAAGACATGTGATCTGCACCTCTGAAGACATGCTTAACCCTAATTATGAAGATTTACTCATTCGTAAGTCTAATCATAATTT
CTTGGTACAGGCTGGTAATGTTCAACTCAGGGTTATTGGACATTCTATGCAAAATTGTGTACTTAAGCTTAAGGTTGATACA
GCCAATCCTAAGACACCTAAGTATAAGTTTGTTCGCATTCAACCAGGACAGACTTTTTCAGTGTTAGCTTGTTACAATGGTT
CACCATCTGGTGTTTACCAATGTGCTATGAGGCCCAATTTCACTATTAAGGGTTCATTCCTTAATGGTTCATGTGGTAGTGT
TGGTTTTAACATAGATTATGACTGTGTCTCTTTTTGTTACATGCACCATATGGAATTACCAACTGGAGTTCATGCTGGCACA
GACTTAGAAGGTAACTTTTATGGACCTTTTGTTGACAGGCAAACAGCACAAGCAGCTGGTACGGACACAACTATTACAGTT
AATGTTTTAGCTTGGTTGTACGCTGCTGTTATAAATGGAGACAGGTGGTTTCTCAATCGATTTACCACAACTCTTAATGACT
TTAACCTTGTGGCTATGAAGTACAATTATGAACCTCTAACACAAGACCATGTTGACATACTAGGACCTCTTTCTGCTCAAAC
TGGAATTGCCGTTTTAGATATGTGTGCTTCATTAAAAGAATTACTGCAAAATGGTATGAATGGACGTACCATATTGGGTAG
TGCTTTATTAGAAGATGAATTTACACCTTTTGATGTTGTTAGACAATGCTCAGGTGTTACTTTCCAAAGTGCAGTGAAAAGA
ACAATCAAGGGTACACACCACTGGTTGTTACTCACAATTTTGACTTCACTTTTAGTTTTAGTCCAGAGTACTCAATGGTCTTT
GTTCTTTTTTTTGTATGAAAATGCCTTTTTACCTTTTGCTATGGGTATTATTGCTATGTCTGCTTTTGCAATGATGTTTGTCAA
ACATAAGCATGCATTTCTCTGTTTGTTTTTGTTACCTTCTCTTGCCACTGTAGCTTATTTTAATATGGTCTATATGCCTGCTAG
TTGGGTGATGCGTATTATGACATGGTTGGATATGGTTGATACTAGTTTGTCTGGTTTTAAGCTAAAAGACTGTGTTATGTAT
GCATCAGCTGTAGTGTTACTAATCCTTATGACAGCAAGAACTGTGTATGATGATGGTGCTAGGAGAGTGTGGACACTTATG
AATGTCTTGACACTCGTTTATAAAGTTTATTATGGTAATGCTTTAGATCAAGCCATTTCCATGTGGGCTCTTATAATCTCTGT
TACTTCTAACTACTCAGGTGTAGTTACAACTGTCATGTTTTTGGCCAGAGGTATTGTTTTTATGTGTGTTGAGTATTGCCCTA
TTTTCTTCATAACTGGTAATACACTTCAGTGTATAATGCTAGTTTATTGTTTCTTAGGCTATTTTTGTACTTGTTACTTTGGCC
TCTTTTGTTTACTCAACCGCTACTTTAGACTGACTCTTGGTGTTTATGATTACTTAGTTTCTACACAGGAGTTTAGATATATG
AATTCACAGGGACTACTCCCACCCAAGAATAGCATAGATGCCTTCAAACTCAACATTAAATTGTTGGGTGTTGGTGGCAAA
CCTTGTATCAAAGTAGCCACTGTACAGTCTAAAATGTCAGATGTAAAGTGCACATCAGTAGTCTTACTCTCAGTTTTGCAAC
AACTCAGAGTAGAATCATCATCTAAATTGTGGGCTCAATGTGTCCAGTTACACAATGACATTCTCTTAGCTAAAGATACTAC
TGAAGCCTTTGAAAAAATGGTTTCACTACTTTCTGTTTTGCTTTCCATGCAGGGTGCTGTAGACATAAACAAGCTTTGTGAA
GAAATGCTGGACAACAGGGCAACCTTACAAGCTATAGCTTCAGAGTTTAGTTCCCTTCCATCATATGCAGCTTTTGCTACTG
CTCAAGAAGCTTATGAGCAGGCTGTTGCTAATGGTGATTCTGAAGTTGTTCTTAAAAAGTTGAAGAAGTCTTTGAATGTGG
CTAAATCTGAATTTGACCGTGATGCAGCCATGCAACGTAAGTTGGAAAAGATGGCTGATCAAGCTATGACCCAAATGTATA
AACAGGCTAGATCTGAGGACAAGAGGGCAAAAGTTACTAGTGCTATGCAGACAATGCTTTTCACTATGCTTAGAAAGTTG
GATAATGATGCACTCAACAACATTATCAACAATGCAAGAGATGGTTGTGTTCCCTTGAACATAATACCTCTTACAACAGCA
GCCAAACTAATGGTTGTCATACCAGACTATAACACATATAAAAATACGTGTGATGGTACAACATTTACTTATGCATCAGCAT
TGTGGGAAATCCAACAGGTTGTAGATGCAGATAGTAAAATTGTTCAACTTAGTGAAATTAGTATGGACAATTCACCTAATT
TAGCATGGCCTCTTATTGTAACAGCTTTAAGGGCCAATTCTGCTGTCAAATTACAGAATAATGAGCTTAGTCCTGTTGCACT
ACGACAGATGTCTTGTGCTGCCGGTACTACACAAACTGCTTGCACTGATGACAATGCGTTAGCTTACTACAACACAACAAA
GGGAGGTAGGTTTGTACTTGCACTGTTATCCGATTTACAGGATTTGAAATGGGCTAGATTCCCTAAGAGTGATGGAACTG
GTACTGTCTATACAGAACTGGAACCACCTTGTAGGTTTGTTACAGACACACCTAAAGGTCCTAAAGTGAAGTATTTATACTT
TATTAAAGGATTAAACAACCTAAATAGAGGTATGGTACTTGGTAGTTTAGCTGCCACAGTACGTCTACAAGCTGGTAATGC
AACAGAAGTGCCTGCCAATTCAACTGTATTATCTTTCTGTGCTTTTGCTGTAGATGCTGCTAAAGCTTACAAAGATTATCTA
GCTAGTGGGGGACAACCAATCACTAATTGTGTTAAGATGTTGTGTACACACACTGGTACTGGTCAGGCAATAACAGTTACA
CCGGAAGCCAATATGGATCAAGAATCCTTTGGTGGTGCATCGTGTTGTCTGTACTGCCGTTGCCACATAGATCATCCAAAT
CCTAAAGGATTTTGTGACTTAAAAGGTAAGTATGTACAAATACCTACAACTTGTGCTAATGACCCTGTGGGTTTTACACTTA
AAAACACAGTCTGTACCGTCTGCGGTATGTGGAAAGGTTATGGCTGTAGTTGTGATCAACTCCGCGAACCCATGCTTCAGT
CAGCTGATGCACAATCGTTTTTAAACGGGTTTGCGGTGTAAGTGCAGCCCGTCTTACACCGTGCGGCACAGGCACTAGTAC
TGATGTCGTATACAGGGCTTTTGACATCTACAATGATAAAGTAGCTGGTTTTGCTAAATTCCTAAAAACTAATTGTTGTCGC
TTCCAAGAAAAGGACGAAGATGACAATTTAATTGATTCTTACTTTGTAGTTAAGAGACACACTTTCTCTAACTACCAACATG
AAGAAACAATTTATAATTTACTTAAGGATTGTCCAGCTGTTGCTAAACATGACTTCTTTAAGTTTAGAATAGACGGTGACAT
GGTACCACATATATCACGTCAACGTCTTACTAAATACACAATGGCAGACCTCGTCTATGCTTTAAGGCATTTTGATGAAGGT
AATTGTGACACATTAAAAGAAATACTTGTCACATACAATTGTTGTGATGATGATTATTTCAATAAAAAGGACTGGTATGATT
TTGTAGAAAACCCAGATATATTACGCGTATACGCCAACTTAGGTGAACGTGTACGCCAAGCTTTGTTAAAAACAGTACAAT
TCTGTGATGCCATGCGAAATGCTGGTATTGTTGGTGTACTGACATTAGATAATCAAGATCTCAATGGTAACTGGTATGATTT
CGGTGATTTCATACAAACCACGCCAGGTAGTGGAGTTCCTGTTGTAGATTCTTATTATTCATTGTTAATGCCTATATTAACC
TTGACCAGGGCTTTAACTGCAGAGTCACATGTTGACACTGACTTAACAAAGCCTTACATTAAGTGGGATTTGTTAAAATAT
GACTTCACGGAAGAGAGGTTAAAACTCTTTGACCGTTATTTTAAATATTGGGATCAGACATACCACCCAAATTGTGTTAACT
GTTTGGATGACAGATGCATTCTGCATTGTGCAAACTTTAATGTTTTATTCTCTACAGTGTTCCCACTTACAAGTTTTGGACCA
CTAGTGAGAAAAATATTTGTTGATGGTGTTCCATTTGTAGTTTCAACTGGATACCACTTCAGAGAGCTAGGTGTTGTACATA
ATCAGGATGTAAACTTACATAGCTCTAGACTTAGTTTTAAGGAATTACTTGTGTATGCTGCTGACCCTGCTATGCACGCTGC
TTCTGGTAATCTATTACTAGATAAACGCACTACGTGCTTTTCAGTAGCTGCACTTACTAACAATGTTGCTTTTCAAACTGTCA
AACCCGGTAATTTTAACAAAGACTTCTATGACTTTGCTGTGTCTAAGGGTTTCTTTAAGGAAGGAAGTTCTGTTGAATTAAA
ACACTTCTTCTTTGCTCAGGATGGTAATGCTGCTATCAGCGATTATGACTACTATCGTTATAATCTACCAACAATGTGTGATA
TCAGACAACTACTATTTGTAGTTGAAGTTGTTGATAAGTACTTTGATTGTTACGATGGTGGCTGTATTAATGCTAACCAAGT
CATCGTCAACAACCTAGACAAATCAGCTGGTTTTCCATTTAATAAATGGGGTAAGGCTAGACTTTATTATGATTCAATGAGT
TATGAGGATCAAGATGCACTTTTCGCATATACAAAACGTAATGTCATCCCTACTATAACTCAAATGAATCTTAAGTATGCCA
TTAGTGCAAAGAATAGAGCTCGCACCGTAGCTGGTGTCTCTATCTGTAGTACTATGACCAATAGACAGTTTCATCAAAAAT
TATTGAAATCAATAGCCGCCACTAGAGGAGCTACTGTAGTAATTGGAACAAGCAAATTCTATGGTGGTTGGCACAACATGT
TAAAAACTGTTTATAGTGATGTAGAAAACCCTCACCTTATGGGTTGGGATTATCCTAAATGTGATAGAGCCATGCCTAACA
TGCTTAGAATTATGGCCTCACTTGTTCTTGCTCGCAAACATACAACGTGTTGTAGCTTGTCACACCGTTTCTATAGATTAGCT
AATGAGTGTGCTCAAGTATTGAGTGAAATGGTCATGTGTGGCGGTTCACTATATGTTAAACCAGGTGGAACCTCATCAGG
AGATGCCACAACTGCTTATGCTAATAGTGTTTTTAACATTTGTCAAGCTGTCACGGCCAATGTTAATGCACTTTTATCTACTG
ATGGTAACAAAATTGCCGATAAGTATGTCCGCAATTTACAACACAGACTTTATGAGTGTCTCTATAGAAATAGAGATGTTG
ACACAGACTTTGTGAATGAGTTTTACGCATATTTGCGTAAACATTTCTCAATGATGATACTCTCTGACGATGCTGTTGTGTG
TTTCAATAGCACTTATGCATCTCAAGGTCTAGTGGCTAGCATAAAGAACTTTAAGTCAGTTCTTTATTATCAAAACAATGTTT
TTATGTCTGAAGCAAAATGTTGGACTGAGACTGACCTTACTAAAGGACCTCATGAATTTTGCTCTCAACATACAATGCTAGT
TAAACAGGGTGATGATTATGTGTACCTTCCTTACCCAGATCCATCAAGAATCCTAGGGGCCGGCTGTTTTGTAGATGATAT
CGTAAAAACAGATGGTACACTTATGATTGAACGGTTCGTGTCTTTAGCTATAGATGCTTACCCACTTACTAAACATCCTAAT
CAGGAGTATGCTGATGTCTTTCATTTGTACTTACAATACATAAGAAAGCTACATGATGAGTTAACAGGACACATGTTAGAC
ATGTATTCTGTTATGCTTACTAATGATAACACTTCAAGGTATTGGGAACCTGAGTTTTATGAGGCTATGTACACACCGCATA
CAGTCTTACAGGCTGTTGGGGCTTGTGTTCTTTGCAATTCACAGACTTCATTAAGATGTGGTGCTTGCATACGTAGACCATT
CTTATGTTGTAAATGCTGTTACGACCATGTCATATCAACATCACATAAATTAGTCTTGTCTGTTAATCCGTATGTTTGCAATG
CTCCAGGTTGTGATGTCACAGATGTGACTCAACTTTACTTAGGAGGTATGAGCTATTATTGTAAATCACATAAACCACCCAT
TAGTTTTCCATTGTGTGCTAATGGACAAGTTTTTGGTTTATATAAAAATACATGTGTTGGTAGCGATAATGTTACTGACTTTA
ATGCAATTGCAACATGTGACTGGACAAATGCTGGTGATTACATTTTAGCTAACACCTGTACTGAAAGACTCAAGCTTTTTGC
AGCAGAAACGCTCAAAGCTACTGAGGAGACATTTAAACTGTCTTATGGTATTGCTACTGTACGTGAAGTGCTGTCTGACAG
AGAATTACATCTTTCATGGGAAGTTGGTAAACCTAGACCACCACTTAACCGAAATTATGTCTTTACTGGTTATCGTGTAACT
AAAAACAGTAAAGTACAAATAGGAGAGTACACCTTTGAAAAAGGTGACTATGGTGATGCTGTTGTTTACCGAGGTACAAC
AACTTACAAATTAAATGTTGGTGATTATTTTGTGCTGACATCACATACAGTAATGCCATTAAGTGCACCTACACTAGTGCCA
CAAGAGCACTATGTTAGAATTACTGGCTTATACCCAACACTCAATATCTCATATGAGTTTTCTAGCAATGTTGCAAATTATC
AAAAGGTTGGTATGCAAAAGTATTCTACACTCCAGGGACCACCTGGTACTGGTAAGAGTCATTTTGCTATTGGCCTAGCTC
TCTACTACCCTTCTGCTCGCATAGTGTATACAGCTTGCTCTCATGCCGCTGTTGATGCACTATGTGAGAAGGCATTAAAATA
TTTGCCTATAGATAAATGTAGTAGAATTATACCTGCACGTGCTCGTGTAGAGTGTTTTGATAAATTCAAAGTGAATTCAACA
TTAGAACAGTATGTCTTTTGTACTGTAAATGCATTGCCTGAGACGACAGCAGATATAGTTGTCTTTGATGAAATTTCAATGG
CCACAAATTATGATTTGAGTGTTGTCAATGCCAGATTACGTGCTAAGCACTATGTGTACATTGGCGACCCTGCTCAATTACC
TGCACCACGCACATTGCTAACTAAGGGCACACTAGAACCAGAATATTTCAATTCAGTGTGTAGACTTATGAAAACTATAGG
TCCAGACATGTTCCTCGGAACTTGTCGGCGTTGTCCTGCTGAAATTGTTGACACTGTGAGTGCTTTGGTTTATGATAATAAG
CTTAAAGCACATAAAGACAAATCAGCTCAATGCTTTAAAATGTTTTATAAGGGTGTTATCACGCATGATGTTTCATCTGCAA
TTAACAGGCCACAAATAGGCGTGGTAAGAGAATTCCTTACACGTAACCCTGCTTGGAGAAAAGCTGTCTTTATTTCACCTT
ATAATTCACAGAATGCTGTAGCCTCAAAGATTTTGGGACTACCAACTCAAACTGTTGATTCATCACAGGGCTCAGAATATG
ACTATGTCATATTCACTCAAACCACTGAAACAGCTCACTCTTGTAATGTAAACAGATTTAATGTTGCTATTACCAGAGCAAA
AGTAGGCATACTTTGCATAATGTCTGATAGAGACCTTTATGACAAGTTGCAATTTACAAGTCTTGAAATTCCACGTAGGAAT
GTGGCAACTTTACAAGCTGAAAATGTAACAGGACTCTTTAAAGATTGTAGTAAGGTAATCACTGGGTTACATCCTACACAG
GCACCTACACACCTCAGTGTTGACACTAAATTCAAAACTGAAGGTTTATGTGTTGACATACCTGGCATACCTAAGGACATG
ACCTATAGAAGACTCATCTCTATGATGGGTTTTAAAATGAATTATCAAGTTAATGGTTACCCTAACATGTTTATCACCCGCG
AAGAAGCTATAAGACATGTACGTGCATGGATTGGCTTCGATGTCGAGGGGTGTCATGCTACTAGAGAAGCTGTTGGTACC
AATTTACCTTTACAGCTAGGTTTTTCTACAGGTGTTAACCTAGTTGCTGTACCTACAGGTTATGTTGATACACCTAATAATAC
AGATTTTTCCAGAGTTAGTGCTAAACCACCGCCTGGAGATCAATTTAAACACCTCATACCACTTATGTACAAAGGACTTCCT
TGGAATGTAGTGCGTATAAAGATTGTACAAATGTTAAGTGACACACTTAAAAATCTCTCTGACAGAGTCGTATTTGTCTTAT
GGGCACATGGCTTTGAGTTGACATCTATGAAGTATTTTGTGAAAATAGGACCTGAGCGCACCTGTTGTCTATGTGATAGAC
GTGCCACATGCTTTTCCACTGCTTCAGACACTTATGCCTGTTGGCATCATTCTATTGGATTTGATTACGTCTATAATCCGTTT
ATGATTGATGTTCAACAATGGGGTTTTACAGGTAACCTACAAAGCAACCATGATCTGTATTGTCAAGTCCATGGTAATGCA
CATGTAGCTAGTTGTGATGCAATCATGACTAGGTGTCTAGCTGTCCACGAGTGCTTTGTTAAGCGTGTTGACTGGACTATT
GAATATCCTATAATTGGTGATGAACTGAAGATTAATGCGGCTTGTAGAAAGGTTCAACACATGGTTGTTAAAGCTGCATTA
TTAGCAGACAAATTCCCAGTTCTTCACGACATTGGTAACCCTAAAGCTATTAAGTGTGTACCTCAAGCTGATGTAGAATGG
AAGTTCTATGATGCACAGCCTTGTAGTGACAAAGCTTATAAAATAGAAGAATTATTCTATTCTTATGCCACACATTCTGACA
AATTCACAGATGGTGTATGCCTATTTTGGAATTGCAATGTCGATAGATATCCTGCTAATTCCATTGTTTGTAGATTTGACACT
AGAGTGCTATCTAACCTTAACTTGCCTGGTTGTGATGGTGGCAGTTTGTATGTAAATAAACATGCATTCCACACACCAGCTT
TTGATAAAAGTGCTTTTGTTAATTTAAAACAATTACCATTTTTCTATTACTCTGACAGTCCATGTGAGTCTCATGGAAAACAA
GTAGTGTCAGATATAGATTATGTACCACTAAAGTCTGCTACGTGTATAACACGTTGCAATTTAGGTGGTGCTGTCTGTAGA
CATCATGCTAATGAGTACAGATTGTATCTCGATGCTTATAACATGATGATCTCAGCTGGCTTTAGCTTGTGGGTTTACAAAC
AATTTGATACTTATAACCTCTGGAACACTTTTACAAGACTTCAGAGTTTAGAAAATGTGGCTTTTAATGTTGTAAATAAGGG
ACACTTTGATGGACAACAGGGTGAAGTACCAGTTTCTATCATTAATAACACTGTTTACACAAAAGTTGATGGTGTTGATGT
AGAATTGTTTGAAAATAAAACAACATTACCTGTTAATGTAGCATTTGAGCTTTGGGCTAAGCGCAACATTAAACCAGTACC
AGAGGTGAAAATACTCAATAATTTGGGTGTGGACATTGCTGCTAATACTGTGATCTGGGACTACAAAAGAGATGCTCCAG
CACATATATCTACTATTGGTGTTTGTTCTATGACTGACATAGCCAAGAAACCAACTGAAACGATTTGTGCACCACTCACTGT
CTTTTTTGATGGTAGAGTTGATGGTCAAGTAGACTTATTTAGAAATGCCCGTAATGGTGTTCTTATTACAGAAGGTAGTGTT
AAAGGTTTACAACCATCTGTAGGTCCCAAACAAGCTAGTCTTAATGGAGTCACATTAATTGGAGAAGCCGTAAAAACACAG
TTCAATTATTATAAGAAAGTTGATGGTGTTGTCCAACAATTACCTGAAACTTACTTTACTCAGAGTAGAAATTTACAAGAAT
TTAAACCCAGGAGTCAAATGGAAATTGATTTCTTAGAATTAGCTATGGATGAATTCATTGAACGGTATAAATTAGAAGGCT
ATGCCTTCGAACATATCGTTTATGGAGATTTTAGTCATAGTCAGTTAGGTGGTTTACATCTACTGATTGGACTAGCTAAACG
TTTTAAGGAATCACCTTTTGAATTAGAAGATTTTATTCCTATGGACAGTACAGTTAAAAACTATTTCATAACAGATGCGCAA
ACAGGTTCATCTAAGTGTGTGTGTTCTGTTATTGATTTATTACTTGATGATTTTGTTGAAATAATAAAATCCCAAGATTTATC
TGTAGTTTCTAAGGTTGTCAAAGTGACTATTGACTATACAGAAATTTCATTTATGCTTTGGTGTAAAGATGGCCATGTAGAA
ACATTTTACCCAAAATTACAATCTAGTCAAGCGTGGCAACCGGGTGTTGCTATGCCTAATCTTTACAAAATGCAAAGAATGC
TATTAGAAAAGTGTGACCTTCAAAATTATGGTGATAGTGCAACATTACCTAAAGGCATAATGATGAATGTCGCAAAATATA
CTCAACTGTGTCAATATTTAAACACATTAACATTAGCTGTACCCTATAATATGAGAGTTATACATTTTGGTGCTGGTTCTGAT
AAAGGAGTTGCACCAGGTACAGCTGTTTTAAGACAGTGGTTGCCTACGGGTACGCTGCTTGTCGATTCAGATCTTAATGAC
TTTGTCTCTGATGCAGATTCAACTTTGATTGGTGATTGTGCAACTGTACATACAGCTAATAAATGGGATCTCATTATTAGTG
ATATGTACGACCCTAAGACTAAAAATGTTACAAAAGAAAATGACTCTAAAGAGGGTTTTTTCACTTACATTTGTGGGTTTAT
ACAACAAAAGCTAGCTCTTGGAGGTTCCGTGGCTATAAAGATAACAGAACATTCTTGGAATGCTGATCTTTATAAGCTCAT
GGGACACTTCGCATGGTGGACAGCCTTTGTTACTAATGTGAATGCGTCATCATCTGAAGCATTTTTAATTGGATGTAATTAT
CTTGGCAAACCACGCGAACAAATAGATGGTTATGTCATGCATGCAAATTACATATTTTGGAGGAATACAAATCCAATTCAG
TTGTCTTCCTATTCTTTATTTGACATGAGTAAATTTCCCCTTAAATTAAGGGGTACTGCTGTTATGTCTTTAAAAGAAGGTCA
AATCAATGATATGATTTTATCTCTTCTTAGTAAAGGTAGACTTATAATTAGAGAAAACAACAGAGTTGTTATTTCTAGTGAT
GTTCTTGTTAACAACTAAACGAACAATGTTTGTTTTTCTTGTTTTATTGCCACTAGTCTCTATTCAGTGTGTTAATCTTACAAC
CAGAACTCAATTACCCCCTGCATACACTAATTCTTTCACACGTGGTGTTTATTACCCTGACAAAGTTTTCAGATCCTCAGTTT
TACATTCAACTCAGGACTTGTTCTTACCTTTCTTTTCCAATGTTACTTGGTTCCATGCTATACATGTCTCTGGGACCAATGGT
ACTAAGAGGTTTGATAACCCTGTCCTACCATTTAATGATGGTGTTTATTTTGCTTCCACTGAGAAGTCTAACATAATAAGAG
GCTGGATTTTTGGTACTACTTTAGATTCGAAGACCCAGTCCCTACTTATTGTTAATAACGCTACTAATGTTGTTATTAAAGTC
TGTGAATTTCAATTTTGTAATGATCCATTTTTGGGTGTTTATTACCACAAAAACAACAAAAGTTGTATGGAAAGTGAGTTCA
GAGTTTATTCTAGTGCGAATAATTGCACTTTTGAATATGTCTCTCAGCCTTTTCTTATGGACCTTGAAGGAAAACAGGGTAA
TTTCAAAAATCTTAGGGAATTTGTGTTTAAGAATATTGATGGTTATTTTAAAATATATTCTAAGCACACGCCTATTAATTTAG
TGCGTGATCTCCCTCAGGGTTTTTCGGCTTTAGAACCATTGGTAGATTTGCCAATAGGTATTAACATCACTAGGTTTCAAAC
TTTACTTGCTTTACATAGAAGTTATTTGACTCCTGGTGATTCTTCTTCAGGTTGGACAGCTGGTGCTGCAGCTTATTATGTGG
GTTATCTTCAACCTAGGACTTTTCTATTAAAATATAATGAAAATGGAACCATTACAGATGCTGTAGACTGTGCACTTGACCC
TCTCTCAGAAACAAAGTGTACGTTGAAATCCTTCACTGTAGAAAAAGGAATCTATCAAACTTCTAACTTTAGAGTCCAACCA
ACAGAATCTATTGTTAGATTTCCTAATATTACAAACTTGTGCCCTTTTGGTGAAGTTTTTAACGCCACCAGATTTGCATCTGT
TTATGCTTGGAACAGGAAGAGAATCAGCAACTGTGTTGCTGATTATTCTGTCCTATATAATTCCGCATCATTTTCCACTTTTA
AGTGTTATGGAGTGTCTCCTACTAAATTAAATGATCTCTGCTTTACTAATGTCTATGCAGATTCATTTGTAATTAGAGGTGAT
GAAGTCAGACAAATCGCTCCAGGGCAAACTGGAAAGATTGCTGATTATAATTATAAATTACCAGATGATTTTACAGGCTGC
GTTATAGCTTGGAATTCTAACAATCTTGATTCTAAGGTTGGTGGTAATTATAATTACCGGTATAGATTGTTTAGGAAGTCTA
ATCTCAAACCTTTTGAGAGAGATATTTCAACTGAAATCTATCAGGCCGGTAGCACACCTTGTAATGGTGTTGAAGGTTTTAA
TTGTTACTTTCCTTTACAATCATATGGTTTCCAACCCACTAATGGTGTTGGTTACCAACCATACAGAGTAGTAGTACTTTCTT
TTGAACTTCTACATGCACCAGCAACTGTTTGTGGACCTAAAAAGTCTACTAATTTGGTTAAAAACAAATGTGTCAATTTCAA
CTTCAATGGTTTAACAGGCACAGGTGTTCTTACTGAGTCTAACAAAAAGTTTCTGCCTTTCCAACAATTTGGCAGAGACATT
GCTGACACTACTGATGCTGTCCGTGATCCACAGACACTTGAGATTCTTGACATTACACCATGTTCTTTTGGTGGTGTCAGTG
TTATAACACCAGGAACAAATACTTCTAACCAGGTTGCTGTTCTTTATCAGGGTGTTAACTGCACAGAAGTCCCTGTTGCTAT
TCATGCAGATCAACTTACTCCTACTTGGCGTGTTTATTCTACAGGTTCTAATGTTTTTCAAACACGTGCAGGCTGTTTAATAG
GGGCTGAACATGTCAACAACTCATATGAGTGTGACATACCCATTGGTGCAGGTATATGCGCTAGTTATCAGACTCAGACTA
ATTCTCCTCGGGGGCACGTAGTGTAGCTAGTCAATCCATCATTGCCTACACTATGTCACTTGGTGCAGAAAATTCAGTTGC
TTACTCTAATAACTCTATTGCCATACCCACAAATTTTACTATTAGTGTTACCACAGAAATTCTACCAGTGTCTATGACCAAGA
CATCAGTAGATTGTACAATGTACATTTGTGGTGATTCAACTGAATGCAGCAATCTTTTGTTGCAATATGGCAGTTTTTGTAC
ACAATTAAACCGTGCTTTAACTGGAATAGCTGTTGAACAAGACAAAAACACCCAAGAAGTTTTTGCACAAGTCAAACAAAT
TTACAAAACACCACCAATTAAAGATTTTGGTGGTTTTAATTTTTCACAAATATTACCAGATCCATCAAAACCAAGCAAGAGG
TCATTTATTGAAGATCTACTTTTCAACAAAGTGACACTTGCAGATGCTGGCTTCATCAAACAATATGGTGATTGCCTTGGTG
ATATTGCTGCTAGAGACCTCATTTGTGCACAAAAGTTTAACGGCCTTACTGTTTTGCCACCTTTGCTCACAGATGAAATGAT
TGCTCAATACACTTCTGCACTGTTAGCGGGTACAATCACTTCTGGTTGGACCTTTGGTGCAGGTGCTGCATTACAAATACCA
TTTGCTATGCAAATGGCTTATAGGTTTAATGGTATTGGAGTTACACAGAATGTTCTCTATGAGAACCAAAAATTGATTGCCA
ACCAATTTAATAGCGCTATTGGCAAAATTCAAGACTCACTTTCTTCCACAGCAAGTGCACTTGGAAAACTTCAAGATGTGGT
CAACCAAAATGCACAAGCTTTAAACACGCTTGTTAAACAACTTAGCTCCAATTTTGGTGCAATTTCAAGTGTTTTAAATGAT
ATCCTTTCACGTCTTGACAAAGTTGAGGCTGAAGTGCAAATTGATAGGTTGATCACAGGCAGACTTCAAAGTTTGCAGACA
TATGTGACTCAACAATTAATTAGAGCTGCAGAAATCAGAGCTTCTGCTAATCTTGCTGCTACTAAAATGTCAGAGTGTGTAC
TTGGACAATCAAAAAGAGTTGATTTTTGTGGAAAGGGCTATCATCTTATGTCCTTCCCTCAGTCAGCACCTCATGGTGTAGT
CTTCTTGCATGTGACTTATGTCCCTGCACAAGAAAAGAACTTCACAACTGCTCCTGCCATTTGTCATGATGGAAAAGCACAC
TTTCCTCGTGAAGGTGTCTTTGTTTCAAATGGCACACACTGGTTTGTAACACAAAGGAATTTTTATGAACCACAAATCATTA
CTACAGACAACACATTTGTGTCTGGTAACTGTGATGTTGTAATAGGAATTGTCAACAACACAGTTTATGATCCTTTGCAACC
TGAATTAGACTCATTCAAGGAGGAGTTAGATAAATATTTTAAGAATCATACATCACCAGATGTTGATTTAGGTGACATCTCT
GGCATTAATGCTTCAGTTGTAAACATTCAAAAAGAAATTGACCGCCTCAATGAGGTTGCCAAGAATTTAAATGAATCTCTC
ATCGATCTCCAAGAACTTGGAAAGTATGAGCAGTATATAAAATGGCCATGGTACATTTGGCTAGGTTTTATAGCTGGCTTG
ATTGCCATAGTAATGGTGACAATTATGCTTTGCTGTATGACCAGTTGCTGTAGTTGTCTCAAGGGCTGTTGTTCTTGTGGAT
CCTGCTGCAAATTTGATGAAGACGACTCTGAGCCAGTGCTCAAAGGAGTCAAATTACATTACACATAAACGAACTTATGGA
TTTGTTTATGAGAATCTTCACAATTGGAACTGTAACTTTGAAGCAAGGTGAAATCAAGGATGCTACTCCTTCAGATTTTGTT
CGCGCTACTGCAACGATACCGATACAAGCCTCACTCCCTTTCGGATGGCTTATTGTTGGCGTTGCACTTCTTGCTGTTTTTCA
TAGCGCTTCCAAAATCATAACCCTCAAAAAGAGATGGCAACTAGCACTCTCCAAGGGTGTTCACTTTGTTTGCAACTTGCTG
TTGTTGTTTGTAACAGTTTACTCACACCTTTTGCTCGTTGCTGTTGGCCTTGAAGCCCCTTTTCTCTATCTTTATGCTTTAGTC
TACTTCTTGCAGAGTATAAACTTTGTAAGAATAATAATGAGGCTTTGGCTTTGCTGGAAATGCCGTTCCAAAAACCCATTAC
TTTATGATGCCAACTATTTTCTTTGCTGGCATACTAATTGTTACGACTATTGTATACCTTACAATAGTGTAACTTCTTCAATTG
TCATTACTTCAGGTGATGGCACAACAAGTCCTATTTCTGAACATGACTACCAGATTGGTGGTTATACTGAAAAATGGGAAT
CTGGAGTAAAAGACTGTGTTGTATTACACAGTTACTTCACTTCAGACTATTACCAGCTGTACTCAACTCAATTGAGTACAGA
CACTGGTGTTGAACATGTTACCTTCTTCATCTACAATAAAATTGTTGATGAGCCTGAAGAACATGTCCAAATTCACACAATC
GACGGTTCATCCGGAGTTGTTAATCCAGTAATGGAACCAATTTATGATGAACCGACGACGACTACTAGCGTGCCTTTGTAA
GCACAAGCTGATGAGTACGAACTTATGTACTCATTCGTTTCGGAAGAGACAGGTACGTTAATAGTTAATAGCGTACTTCTT
TTTCTTGCTTTCGTGGTATTCTTGCTAGTTACACTAGCCATCCTTACTGCGCTTCGATTGTGTGCGTACTGCTGCAATATTGTT
AACGTGAGTCTTGTAAAACCTTCTTTTTACGTTTACTCTCGTGTTAAAAATCTGAATTCTTCTAGAGTTCCTGATCTTCTGGTC
TAAACGAACTAAATATTATATTAGTTTTTCTGTTTGGAACTTTAATTTTAGCCATGGCAGATTCCAACGGTACTATTACCGTT
GAAGAGCTTAAAAAGCTCCTTGAACAATGGAACCTAGTAATAGGTTTCCTATTCCTTACATGGATTTGTCTTCTACAATTTG
CCTATGCCAACAGGAATAGGTTTTTGTATATAATTAAGTTAATTTTTCTCTGGCTGTTATGGCCAGTAACTTTAGCTTGTTTT
GTGCTTGCTGCTGTTTACAGAATAAATTGGATCACCGGTGGAATTGCTATCGCAATGGCTTGTCTTGTAGGCTTGATGTGG
CTCAGCTACTTCATTGCTTCTTTCAGACTGTTTGCGCGTACGCGTTCCATGTGGTCATTCAATCCAGAAACTAACATTCTTCT
CAACGTGCCACTCCATGGCACTATTCTGACCAGACCGCTTCTAGAAAGTGAACTCGTAATCGGAGCTGTGATCCTTCGTGG
ACATCTTCGTATTGCTGGACACCATCTAGGACGCTGTGACATCAAGGACCTGCCTAAAGAAATCACTGTTGCTACATCACG
AACGCTTTCTTATTACAAATTGGGAGCTTCGCAGCGTGTAGCAGGTGACTCAGGTTTTGCTGCATACAGTCGCTACAGGAT
TGGCAACTATAAATTAAACACAGACCATTCCAGTAGCAGTGACAATATTGCTTTGCTTGTACAGTAAGTGACAACAGATGT
TTCATCTCGTTGACTTTCAGGTTACTATAGCAGAGATATTACTAATTATTATGAGGACTTTTAAAGTTTCCATTTGGAATCTT
GATTACATCATAAACCTCATAATTAAAAATTTATCTAAGTCACTAACTGAGAATAAATATTCTCAATTAGATGAAGAGCAAC
CAATGGAGATTGATTAAACGAACATGAAAATTATTCTTTTCTTGGCACTGATAACACTCGCTACTTGTGAGCTTTATCACTA
CCAAGAGTGTGTTAGAGGTACAACAGTACTTTTAAAAGAACCTTGCTCTTCTGGAACATACGAGGGCAATTCACCATTTCA
TCCTCTAGCTGATAACAAATTTGCACTGACTTGCTTTAGCACTCAATTTGCTTTTGCTTGTCCTGACGGCGTAAAACACGTCT
ATCAGTTACGTGCCAGATCAGTTTCACCTAAACTGTTCATCAGACAAGAGGAAGTTCAAGAACTTTACTCTCCAATTTTTCTT
ATTGTTGCGGCAATAGTGTTTATAACACTTTGCTTCACACTCAAAAGAAAGACAGAATGATTGAACTTTCATTAATTGACTT
CTATTTGTGCTTTTTAGCCTTTCTGCTATTCCTTGTTTTAATTATGCTTATTATCTTTTGGTTCTCACTTGAACTGCAAGATCAT
AATGAAACTTGTCACGCCTAAACTAACATGAAATTTCTTGTTTTCTTAGGAATCATCACAACTGTAGCTGCATTTCACCAAG
AATGTAGTTTACAGTCATGTACTCAACATCAACCATATGTAGTTGATGACCCGTGTCCTATTCACTTCTATTCTAAATGGTAT
ATTAGAGTAGGAGCTAGAAAATCAGCACCTTTAATTGAATTGTGCGTGGATGAGGCTGGTTCTAAATCACCCATTCAGTAC
ATCGATATCGGTAATTATACAGTTTCCTGTTTACCTTTTACAATTAATTGCCAGGAACCTAAATTGGGTAGTCTTGTAGTGC
GTTGTTCGTTCTATGAAGACTTTTTAGAGTATCATGACGTTCGTGTTGTTTTAGATTTCATCTAAACGAACAAACTATAATGT
CTGATAATGGACCCCAAAATCAGCGAAATGCACCCCGCATTACGTTTGGTGGACCCTCAGATTCAACTGGCAGTAACCAGA
ATGGAGAACGCAGTGGGGCGCGATCAAAACAACGTCGGCCCCAAGGTTTACCCAATAATACTGCGTCTTGGTTCACCGCT
CTCACTCAACATGGCAAGGAAGACCTTAAATTCCCTCGAGGACAAGGCGTTCCAATTAACACCAATAGCAGTCCAGATGAC
CAAATTGGCTACTACCGAAGAGCTACCAGACGAATTCGTGGTGGTGACGGTAAAATGAAAGATCTCAGTCCAAGATGGT
ATTTCTACTACCTAGGAACTGGGCCAGAAGCTGGACTTCCCTATGGTGCTAACAAAGACGGCATCATATGGGTTGCAACTG
AGGGAGCCTTGAATACACCAAAAGATCACATTGGCACCCGCAATCCTGCTAACAATGCTGCAATCGTGCTACAACTTCCTC
AAGGAACAACATTGCCAAAAGGCTTCTACGCAGAAGGGAGCAGAGGCGGCAGTCAAGCCTCTTCTCGTTCCTCATCACGT
AGTCGCAACAGTTCAAGAAATTCAACTCCAGGCAGCAGTAGGGGAATTTCTCCTGCTAGAATGGCTGGCAATGGCGGTGA
TGCTGCTCTTGCTTTGCTGCTGCTTGACAGATTGAACCAGCTTGAGAGCAAAATGTCTGGTAAAGGCCAACAACAACAAGG
CCAAACTGTCACTAAGAAATCTGCTGCTGAGGCTTCTAAGAAGCCTCGGCAAAAACGTACTGCCACTAAAGCATACAATGT
AACACAAGCTTTCGGCAGACGTGGTCCAGAACAAACCCAAGGAAATTTTGGGGACCAGGAACTAATCAGACAAGGAACT
GATTACAAACATTGGCCGCAAATTGCACAATTTGCCCCCAGCGCTTCAGCGTTCTTCGGAATGTCGCGCATTGGCATGGAA
GTCACACCTTCGGGAACGTGGTTGACCTACACAGGTGCCATCAAATTGGATGACAAAGATCCAAATTTCAAAGATCAAGTC
ATTTTGCTGAATAAGCATATTGACGCATACAAAACATTTCCACCAACAGAGCCTAAAAAGGACAAAAAGAAGAAGGCTGA
TGAAACTCAAGCCTTACCGCAGAGACAGAAGAAACAGCAAACTGTGACTCTTCTTCCTGCTGCAGATTTGGATGATTTCTC
CAAACAATTGCAACAATCCATGAGCAGTGCTGACTCAACTCAGGCCTAAACTCATGCAGACCACACAAGGCAGATGGGCT
ATATAAACGTTTTCGCTTTTCCGTTTACGATATATAGTCTACTCTTGTGCAGAATGAATTCTCGTAACTACATAGCACAAGTA
GATGTAGTTAACTTTAATCTCACATAGCAATCTTTAATCAGTGTGTAACATTAGGGAGGACTTGAAAGAGCCACCACATTTT
CACCGAGGCCACGCGGAGTACGATCGAGTGTACAGTGAACAATGCTAGGGAGAGCTGCCTATATGGAAGAGCCCTAATG
TGTAAAATTAATTTTAGTAGTGCTATCCCCATGTGATTTTAATAGC
SEQ ID NO: 27
>QPJ72086.1. S-protein surface glycoprotein
MFVFLVLLPLVSIQCVNLTTRTQLPPAYTNSFTRGVYYPDKVFRSSVLHSTQDLFLPFFSNVTWFHAIHVSGTNGTKRFDNPVLPF
NDGVYFASTEKSNIIRGWIFGTTLDSKTQSLLIVNNATNVVIKVCEFQFCNDPFLGVYYHKNNKSCMESEFRVYSSANNCTFEYVS
QPFLMDLEGKQGNFKNLREFVFKNIDGYFKIYSKHTPINLVRDLPQGFSALEPLVDLPIGINITRFQTLLALHRSYLTPGDSSSGWT
AGAAAYYVGYLQPRTFLLKYNENGTITDAVDCALDPLSETKCTLKSFTVEKGIYQTSNFRVQPTESIVRFPNITNLCPFGEVFNATR
FASVYAWNRKRISNCVADYSVLYNSASFSTFKCYGVSPTKLNDLCFTNVYADSFVIRGDEVRQIAPGQTGKIADYNYKLPDDFTG
CVIAWNSNNLDSKVGGNYNYRYRLFRKSNLKPFERDISTEIYQAGSTPCNGVEGENCYFPLQSYGFQPTNGVGYQPYRVVVLSF
ELLHAPATVCGPKKSTNLVKNKCVNFNFNGLTGTGVLTESNKKFLPFQQFGRDIADTTDAVRDPQTLEILDITPCSFGGVSVITPG
TNTSNQVAVLYQGVNCTEVPVAIHADQLTPTWRVYSTGSNVFQTRAGCLIGAEHVNNSYECDIPIGAGICASYQTQTNSPRRAR
SVASQSIIAYTMSLGAENSVAYSNNSIAIPTNFTISVTTEILPVSMTKTSVDCTMYICGDSTECSNLLLQYGSFCTQLNRALTGIAVE
QDKNTQEVFAQVKQIYKTPPIKDFGGFNFSQILPDPSKPSKRSFIEDLLFNKVTLADAGFIKQYGDCLGDIAARDLICAQKFNGLTV
LPPLLTDEMIAQYTSALLAGTITSGWTFGAGAALQIPFAMQMAYRFNGIGVTQNVLYENQKLIANQFNSAIGKIQDSLSSTASAL
GKLQDVVNQNAQALNTLVKQLSSNFGAISSVLNDILSRLDKVEAEVQIDRLITGRLQSLQTYVTQQLIRAAEIRASANLAATKMSE
CVLGQSKRVDFCGKGYHLMSFPQSAPHGVVFLHVTYVPAQEKNFTTAPAICHDGKAHFPREGVFVSNGTHWFVTQRNFYEPQ
IITTDNTFVSGNCDVVIGIVNNTVYDPLQPELDSFKEELDKYFKNHTSPDVDLGDISGINASVVNIQKEIDRLNEVAKNUNESLIDL
QELGKYEQYIKWPWYIWLGFIAGLIAIVMVTIMLCCMTSCCSCLKGCCSCGSCCKFDEDDSEPVLKGVKLHYT
SEQ ID NO: 28
>nucleocapsid phosphoprotein [Severe acute respiratory syndrome coronavirus 2](Accession No: QJA98561)
MSDNGPQNQRNAPRITFGGPSDSTGSNQNGERSGARSKQRRPQGLPNNTASWFTALTQHGKEDLKFPRGQGVPINTNSSP
DDQIGYYRRATRRIRGGDGKMKDLSPRWYFYYLGTGPEAGLPYGANKDGIIWVATEGALNTPKDHIGTRNPANNAAIVLQLP
QGTTLPKGFYAEGSRGGSQASSRSSSRSRNSSRNSTPGSSRGTSPARMAGNGGDAALALLLLDRLNQLESKMSGKGQQQQG
QTVTKKSAAEASKKPRQKRTATKAYNVTQAFGRRGPEQTQGNFGDQELIRQGTDYKHWPQIAQFAPSASAFFGMSRIGMEV
TPSGTWLTYTGAIKLDDKDPNFKDQVILLNKHIDAYKTFPPTEPKKDKKKKADETQALPQRQKKQQTVILLPAADLDDFSKQLQ
QSMSSADSTQA
SEQ ID NO: 29
>membrane glycoprotein [Severe acute respiratory syndrome coronavirus 2](Accession No: QIA98557)
MADSNGTITVEELKKLLEQWNLVIGFLFLTWICLLQFAYANRNRFLYIIKLIFLWLLWPVTLACFVLAAVYRINWITGGIAIAMACL
VGLMWLSYFIASFRLFARTRSMWSFNPETNILLNVPLHGTILTRPLLESELVIGAVILRGHLRIAGHHLGRCDIKDLPKEITVATSRT
LSYYKLGASQRVAGD SGFAAYSRYRIGNYKLNTDHSSSSDNIALLVQ

1.-64. (canceled)

65. A severe acute respiratory syndrome coronavirus 2 (SARS-CoV-2) vaccine comprising a beta-propiolactone-inactivated SARS-CoV-2 particle, wherein the vaccine is capable of generating neutralizing antibodies against native SARS-CoV-2 particles in a human subject, and wherein the SARS-CoV-2 particle is inactivated at a beta-propiolactone (BPL) concentration of 0.01 to 0.1% by weight.

66. The SARS-CoV-2 vaccine of claim 65, wherein a native surface conformation of the SARS-CoV-2 particle is preserved in the vaccine.

67. The SARS-CoV-2 vaccine of claim 65,
wherein the SARS-CoV-2 particle is beta-propiolactone-inactivated at a concentration of 300 to 700 ppm, more preferably 500 ppm or about 0.03% by weight, and inactivated for about 1 hour to 48 hour, preferably 20 hours to 28 hours, most preferred 24 hours±2 hours (such as also ±1 hour or ±0.5 hour) at 2° C. to 8° C., followed optionally by a hydrolyzation for 2.5 hours±0.5 hours at 35° C. to 39° C., preferably around 37° C.; and/or
wherein the inactivated SARS-CoV-2 particle comprises a native conformation of (i) spike (S) protein; (ii) nucleocapsid (N) protein; (iii) membrane (M) glycoprotein; and/or (iv) envelope (E) protein; preferably wherein the inactivated SARS-CoV-2 particle comprises a native conformation spike (S) protein; and/or
wherein the inactivated SARS-CoV-2 particle comprises one or more beta-propiolactone-modified cysteine, methionine, and/or histidine residues; and/or
wherein the inactivated SARS-CoV-2 particle comprises fewer than 200, 100, 50, 30, 20, 15, 10, 9, 8, 7 or 6 beta-propiolactone-modified amino acid residues; preferably wherein a spike (S) protein of the inactivated SARS-CoV-2 particle comprises fewer than 100, 50, 30, 20, 15, 10, 9, 8, 7 or 6 beta-propiolactone-modified amino acid residues; more preferably wherein the inactivated SARS-CoV-2 particle or spike protein thereof comprises 15 or fewer beta-propiolactone-modified amino acid residues; most preferably wherein the inactivated SARS-CoV-2 particle or spike protein thereof comprises 1 to 100, 2 to 50, 3 to 30, 5 to 20 or about 15 beta-propiolactone-modified amino acid residues; and/or
wherein fewer than 20%, 15%, 10%, 5% or 4% of SARS-CoV-2 polypeptides in the particle are beta-propiolactone-modified; preferably wherein 0.1 to 10%, more preferably 1 to 5%, more preferably 2 to 8% or about 3 to 6% of SARS-CoV-2 polypeptides in the particle, comprise at least one beta-propiolactone modification; preferably as detected in the vaccine by mass spectroscopy, optionally following enzymatic digestion with trypsin, chymotrypsin and/or PNGase F or acid hydrolysis, and/or
wherein:
(i) a spike (S) protein of the inactivated SARS-CoV-2 particle comprises a beta-propiolactone modification at one or more of the following residues: 49, 146, 166, 177, 207, 245, 379, 432, 519, 625, 1029, 1032, 1058, 1083, 1088, 1101, 1159 and/or 1271; preferably H49, H146, C166, M177, H207, H245, C432, H519, H625, M1029, H1058, H1083, H1088, H1101, H1159 and/or H1271; or H207, H245, C379, M1029 and/or C1032, e.g. in SEQ ID NO: 3, or a corresponding position in any one of SEQ ID NO: 19, 21, 23, 25 or 27; and/or
(ii) a membrane (M) glycoprotein of the inactivated SARS-CoV-2 particle comprises a beta-propiolactone modification at one or more of the following residues: 125, 154, 155, 159 and/or 210; preferably H154, H155, C159 and/or H210, e.g. in SEQ ID NO: 29;
(iii) a nucleocapsid (N) protein of the inactivated SARS-CoV-2 particle comprises a beta-propiolactone modification at M234, e.g. in SEQ ID NO: 28, and/or
wherein fewer than 30%, 20%, 10%, 5%, 3% or 1% of one or more of the following residues, preferably of at least 2, 3, 4, 5, 6, 7, 8, 9, 10, 11, 12, 13, 14, 15, 16, 17, 18, 19 or all of the following residues, in the inactivated SARS-CoV-2 particles are beta-propiolactone modified:
(i) in the spike (S) protein, residues 49, 146, 166, 177, 207, 245, 379, 432, 519, 625, 1029, 1032, 1058, 1083, 1088, 1101, 1159 and/or 1271; preferably H49, H146, C166, M177, H207, H245, C432, H519, H625, M1029, H1058, H1083, H1088, H1101, H1159 and/or H1271; or H207, H245, C379, M1029 and/or C1032; e.g. in SEQ ID NO: 3, or a corresponding position in SEQ ID NO: 19, 21, 23, 25 or 27; and/or
(ii) in the membrane (M) glycoprotein, residues 125, 154, 155, 159 and/or 210; preferably H154, H155, C159 and/or H210; e.g. in SEQ ID NO: 29; and/or (iii) M234 of the nucleocapsid (N) protein, e.g. in SEQ ID NO: 28; and/or
wherein the proportion of beta-propiolactone-modified residues at each of the following positions in the inactivated SARS-CoV-2 particles is:
(i) in the spike (S) protein (e.g. of SEQ ID NO: 3, or a corresponding position in SEQ ID NO: 19, 21, 23, 25 or 27):
(a) residues H49, H146, C166, H207, H519, M1029, H1083, H1088, H1101, H1159 and/or H1271: less than 20%, preferably 0.01 to 10%, more preferably 0.1 to 5%; and/or
(b) residues M177, C432, H625: less than 30%, preferably 0.1 to 20%, more preferably 1 to 10%; and/or
(c) residues H245, H1058: less than 30%, preferably 0.1 to 20%, more preferably 5 to 15%;
(ii) in the membrane (M) glycoprotein (e.g. of SEQ ID NO: 29):
(d) H154: less than 5%, less than 1% or less than 0.1%; and/or
(e) H155: less than 10%, preferably 0.1 to 5%; and/or
(f) C159: less than 5%, less than 1% or less than 0.1%; and/or
(g) H210: less than 20%, preferably 0.1 to 10%; and/or
(iii) in the nucleocapsid (N) protein (e.g. of SEQ ID NO: 28):
(h) M234: less than 90%, less than 10% or less than 0.1%, and/or
wherein infectivity of mammalian cells by the inactivated SARS-CoV-2 particle is reduced by at least 99%, 99.99% or 99.9999% as compared to a native SARS-CoV-2 particle, or wherein infectivity of mammalian cells by the inactivated SARS-CoV-2 particle is undetectable.

68. The SARS-CoV-2 vaccine of claim 65, further comprising one or more pharmaceutically acceptable excipients, such as, e.g., human serum albumin (HSA), and/or an adjuvant, preferably
(i) a liposomal preparation comprising 3-O-desacyl-4′-monophosphoryl lipid A (MPL) and saponin QS-21, preferably Adjuvant System 01;
(ii) a CpG ODN comprising the sequence 5′ TGACTGTGAACGTTCGAGATGA 3′ (SEQ ID NO:4), preferably CpG 1018;
(iii) squalene, DL-α-tocopherol and polysorbate 80, preferably Adjuvant System 03;
(iv) an oil-in-water emulsion comprising squalene, Tween 80 and Span 85, preferably MF59;
(v) a peptide of sequence KLKL₅KLK (SEQ ID NO: 5) and oligo-d(IC)₁₃ (SEQ ID NO: 6), preferably IC31; or
(vi) an aluminium salt selected from aluminium hydroxide and aluminium phosphate and optionally a Th1 response-directing adjuvant, wherein the Th1 response-directing adjuvant comprises 3-O-desacyl-4′-monophosphoryl lipid A (MPL), saponin QS-21, a CpG-containing oligodeoxynucleotide (CpG ODN), squalene, DL-α-tocopherol, a cationic peptide, a deoxyinosine-containing immunostimulatory oligodeoxynucleic acid molecule (I-ODN) and/or imiquimod.

69. The SARS-CoV-2 vaccine of claim 65, wherein the vaccine is able to seroconvert a subject that is administered the SARS-CoV-2 vaccine with at least 70%, at least 80%, at least 85%, at least 90%, or at least 95% probability.

70. The SARS-CoV-2 vaccine of claim 65,
wherein the SARS-CoV-2 particle comprises an RNA sequence (and/or fragments thereof, optionally comprising modified (preferably alkylated or acylated) nucleotide residues) corresponding to a DNA sequence (i) as defined by SEQ ID NO: 9; or (ii) having at least 80%, at least 85%, at least 90%, at least 95% or at least 99% sequence identity to SEQ ID NO: 9; preferably wherein a native (non-inactivated) SARS-CoV-2 particle comprising the RNA sequence is able to pack a virulent SARS-CoV-2, and/or
wherein the vaccine comprises an additional SARS-CoV-2 particle that comprises an RNA sequence (and/or fragments thereof, optionally comprising modified (preferably alkylated or acylated) nucleotide residues) corresponding to a DNA sequence (i) as defined by SEQ ID NO: 18; or (ii) having at least 80%, at least 85%, at least 90%, at least 95% or at least 99% sequence identity to SEQ ID NO: 18; preferably wherein a native (non-inactivated) SARS-CoV-2 particle comprising the RNA sequence is able to pack a virulent SARS-CoV-2, and/or
wherein the vaccine comprises an additional SARS-CoV-2 particle that comprises an RNA sequence (and/or fragments thereof, optionally comprising modified (preferably alkylated or acylated) nucleotide residues) corresponding to a DNA sequence (i) as defined by SEQ ID NO: 22; or (ii) having at least 80%, at least 85%, at least 90%, at least 95% or at least 99% sequence identity to SEQ ID NO: 22; preferably wherein a native (non-inactivated) SARS-CoV-2 particle comprising the RNA sequence is able to pack a virulent SARS-CoV-2, and/or
wherein the vaccine is obtained or obtainable from Vero cells, and/or
wherein, upon administration to a human subject, the vaccine (i) does not induce antibody-dependent enhancement (ADE) of SARS-CoV-2-associated disease (COVID-19); and/or (ii) does not induce immunopathology in the subject.

71. A method of producing a severe acute respiratory syndrome coronavirus 2 (SARS-CoV-2) vaccine, comprising:
(a) producing native SARS-CoV-2 particles;
(b) inactivating the native SARS-CoV-2 particles with beta-propiolactone (BPL) to obtain inactivated SARS-CoV-2 particles;
(c) incorporating the inactivated SARS-CoV-2 particles into a vaccine composition;
wherein a native surface conformation of the SARS-CoV-2 particle is preserved in the inactivation step, such that the vaccine is capable of generating neutralizing antibodies against native SARS-CoV-2 particles in a human subject, and wherein the concentration of BPL in the inactivation step is 0.01 to 0.1% by weight.

72. The method of claim 71, wherein the vaccine composition comprises aluminium hydroxide, preferably wherein the SARS-CoV-2 vaccine composition comprising aluminium hydroxide contains less than 1.25 ppb copper (Cu).

73. The method of claim 71, wherein the concentration of BPL in the inactivation step is about 0.03% by weight, preferably wherein the native SARS-CoV-2 particles are contacted with BPL for at least 5 hours, at least 10 hours, at least 24 hours or at least 4 days, and wherein the inactivation step is performed at about 4° C. or about 22° C.

74. The method of claim 71, wherein step (a) comprises one or more of the following steps:
(i) passaging a SARS-CoV-2 on Vero cells, thereby producing a culture medium comprising the SARS-CoV-2;
(ii) harvesting the culture medium of (i); and
(iii) precipitating the harvested culture medium of (ii), thereby producing native SARS-CoV-2 particles in a supernatant.

75. The method of claim 74, further comprising one or more of the following steps:
(iv) concentrating the culture medium of (ii) prior to step (iii);
(v) contacting the culture medium of (ii) with protamine sulfate or benzonase for the precipitation of (iii);
(vi) dialyzing the inactivated SARS-CoV-2 particles, thereby producing a dialyzed SARS-CoV-2; and
(vii) filtering the dialyzed SARS-CoV-2.

76. The method of claim 71,
wherein the inactivation step comprises contacting a liquid composition comprising native SARS-CoV-2 particles with BPL in a container, mixing the BPL and the liquid composition comprising SARS-CoV-2 particles under conditions of laminar flow but not turbulent flow, and incubating the BPL and the liquid composition comprising SARS-CoV-2 particles for a time sufficient to inactivate the viral particles; and/or
wherein the inactivation step is performed in a flexible bioreactor bag; and/or
wherein the inactivation step comprises five or less container inversions during the period of inactivation; and/or
wherein the mixing of the BPL and the composition comprising native SARS-CoV-2 particles comprises subjecting the container to rocking, rotation, orbital shaking, or oscillation for not more than 10 minutes at not more than 10 rpm during the period of incubation.

77. The method of claim 71, further comprising
(d) purifying the inactivated SARS-CoV-2 particles by one or more methods selected from (i) batch chromatography and/or (ii) sucrose density gradient centrifugation.

78. The method of claim 71, wherein step (c) comprises combining the inactivated SARS-CoV-2 particles with an adjuvant, preferably wherein the adjuvant comprises a Th1 response-directing adjuvant, more preferably wherein the Th1 response-directing adjuvant comprises 3-O-desacyl-4′-monophosphoryl lipid A (MPL), saponin QS-21, a CpG-containing oligodeoxynucleotide (CpG ODN), squalene, DL-α-tocopherol, and/or imiquimod.

79. A SARS-CoV-2 vaccine obtained or obtainable by the method of claim 71.

80. A method of preventing or treating a severe acute respiratory syndrome coronavirus 2 (SARS-CoV-2) infection in a subject, comprising administering the subject a pharmaceutical composition, wherein the pharmaceutical composition is the inactivated SARS-CoV-2 vaccine of claim 65, optionally in combination with one or more pharmaceutically acceptable excipients and/or adjuvants.

81. The SARS-CoV-2 vaccine of claim 65 for use as a medicament in the treatment of a subject.

82. The method of claim 80, wherein the subject is
(i) an elderly subject, preferably a subject over 65, over 70 or over 80 years of age;
(ii) an immunocompromised subject; or
(iii) a pregnant subject.

83. The method of claim 80, wherein, upon administration to a subject, the vaccine
(A) does not induce antibody-dependent enhancement (ADE) of SARS-CoV-2-associated disease (COVID-19); and/or
(B) does not induce immunopathology in the subject.

84. The method of claim 80, further comprising administering to the subject a second dose of a prophylactically or therapeutically effective amount of the SARS-CoV-2 vaccine, preferably wherein the second dose of the vaccine is the same formulation as the first, and/or
wherein the prophylactically or therapeutically effective amount of the SARS-CoV-2 vaccine per dose is defined as about 1 to 100 AU/dose, preferably between about 2 to 75 AU/dose, preferably between about 3 and 60 AU/dose, more preferably between about 3 and 55 AU/dose, more preferably between about 3 and 53 AU/dose, as assessed by ELISA, even more preferably between about 3 and 40 AU/dose, more preferably about 10 to 60 AU/dose, 20 to 50 AU/dose, 25 to 45 AU/dose or 30 to 40 AU/dose, such as e.g. 35 AU/dose or 40 AU/dose; and/or
wherein the prophylactically or therapeutically effective amount per dose of the SARS-CoV-2 vaccine is defined as about 0.05 to 50 μg total protein, about 0.1 to 25 μg, about 0.25 to 12.5 μg, preferably about 0.5 to 5 μg total protein, more preferably at least 2.5 μg total protein, at least 3.5 μg total protein or at least 2.5 μg total protein, even more preferably 2.5 μg to 25 μg, 3.5 μg to 10 μg or 4 μg to 6 μg total protein/dose, most preferably about 5 μg total protein/dose, e.g. as measured by (μ)BCA; and/or
wherein the prophylactically or therapeutically effective amount per dose of the SARS-CoV-2 vaccine is defined as about 0.025 to 25 μg S-protein, about 0.05 to 12.5 μg, about 0.125 to 6.25 μg, preferably about 0.25 to 2.5 μg S-protein, as measured by ELISA; and/or
wherein the optional second dose of the SARS-CoV-2 vaccine is administered about 7 days, about 14 days, about 21 days, or about 28 days after a first dose of the SARS-CoV-2 vaccine, preferably wherein the second dose of the vaccine is the same formulation as the first; and/or
wherein the administering results in production of SARS-CoV-2 neutralizing antibodies.

The application's sequence listing, which the Patent Office published only in electronic form, follows.

SEQUENCE LISTING (29 sequences)

SEQ ID NO: 1 - DNA, 29903 bp, SARS-CoV2
attaaaggtttataccttcccaggtaacaaaccaaccaactttcgatctcttgtagatctgttctctaaacgaactttaaaatctgtgtggctgtcactcggctgcatgcttagtgcactcacgcagtataattaataactaattactgtcgttgacaggacacgagtaactcgtctatcttctgcaggctgcttacggtttcgtccgtgttgcagccgatcatcagcacatctaggtttcgtccgggtgtgaccgaaaggtaagatggagagccttgtccctggtttcaacgagaaaacacacgtccaactcagtttgcctgttttacaggttcgcgacgtgctcgtacgtggctttggagactccgtggaggaggtcttatcagaggcacgtcaacatcttaaagatggcacttgtggcttagtagaagttgaaaaaggcgttttgcctcaacttgaacagccctatgtgttcatcaaacgttcggatgctcgaactgcacctcatggtcatgttatggttgagctggtagcagaactcgaaggcattcagtacggtcgtagtggtgagacacttggtgtccttgtccctcatgtgggcgaaataccagtggcttaccgcaaggttcttcttcgtaagaacggtaataaaggagctggtggccatagttacggcgccgatctaaagtcatttgacttaggcgacgagcttggcactgatccttatgaagattttcaagaaaactggaacactaaacatagcagtggtgttacccgtgaactcatgcgtgagcttaacggaggggcatacactcgctatgtcgataacaacttctgtggccctgatggctaccctcttgagtgcattaaagaccttctagcacgtgctggtaaagcttcatgcactttgtccgaacaactggactttattgacactaagaggggtgtatactgctgccgtgaacatgagcatgaaattgcttggtacacggaacgttctgaaaagagctatgaattgcagacaccttttgaaattaaattggcaaagaaatttgacaccttcaatggggaatgtccaaattttgtatttcccttaaattccataatcaagactattcaaccaagggttgaaaagaaaaagcttgatggctttatgggtagaattcgatctgtctatccagttgcgtcaccaaatgaatgcaaccaaatgtgcctttcaactctcatgaagtgtgatcattgtggtgaaacttcatggcagacgggcgattttgttaaagccacttgcgaattttgtggcactgagaatttgactaaagaaggtgccactacttgtggttacttaccccaaaatgctgttgttaaaatttattgtccagcatgtcacaattcagaagtaggacctgagcatagtcttgccgaataccataatgaatctggcttgaaaaccattcttcgtaagggtggtcgcactattgcctttggaggctgtgtgttctcttatgttggttgccataacaagtgtgcctattgggttccacgtgctagcgctaacataggttgtaaccatacaggtgttgttggagaaggttccgaaggtcttaatgacaaccttcttgaaatactccaaaaagagaaagtcaacatcaatattgttggtgactttaaacttaatgaagagatcgccattattttggcatctttttctgcttccacaagtgcttttgtggaaactgtgaaaggtttggattataaagcattcaaacaaattgttgaatcctgtggtaattttaaagttacaaaaggaaaagctaaaaaaggtgcctggaatattggtgaacagaaatcaatactgagtcctctttatgcatttgcatcagaggctgctcgtgttgtacgatcaattttctcccgcactcttgaaactgctcaaaattctgtgcgtgttttacagaaggccgctataacaatactagatggaatttcacagtattcactgagactcattgatgctatgatgttcacatctgatttggctactaacaatctagttgtaatggcctacattacaggtggtgttgttcagttgacttcgcagtggctaactaacatctttggcactgtttatgaaaaactcaaacccgtccttgattggcttgaagagaagtttaaggaaggtgtagagtttcttagagacggttgggaaattgttaaatttatctcaacctgtgcttgtgaaattgtcggtggacaaattgtcacctgtgcaaaggaaattaaggagagtgttcagacattctttaagcttgtaaataaatttttggctttgtgtgctgactctatcattattggtggagctaaacttaaagccttgaatttaggtgaaacatttgtcacgcactcaaagggattgtacagaaagtgtgttaaatccagagaagaaactggcctactcatgcctctaaaagccccaaaagaaattatcttcttagagggagaaacacttcccacagaagtgttaacagaggaagttgtcttgaaaactggtgatttacaaccattagaacaacctactagtgaagctgttgaagctccattggttggtacaccagtttgtattaacgggcttatgttgctcgaaatcaaagacacagaaaagtactgtgcccttgcacctaatatgatggtaacaaacaataccttcacactcaaaggcggtgcaccaacaaaggttacttttggtgatgacactgtgatagaagtgcaaggttacaagagtgtgaatatcacttttgaacttgatgaaaggattgataaagtacttaatgagaagtgctctgcctatacagttgaactcggtacagaagtaaatgagttcgcctgtgttgtggcagatgctgtcataaaaactttgcaaccagtatctgaattacttacaccactgggcattgatttagatgagtggagtatggctacatactacttatttgatgagtctggtgagtttaaattggcttcacatatgtattgttctttctaccctccagatgaggatgaagaagaaggtgattgtgaagaagaagagtttgagccatcaactcaatatgagtatggtactgaagatgattaccaaggtaaacctttggaatttggtgccacttctgctgctcttcaacctgaagaagagcaagaagaagattggttagatgatgatagtcaacaaactgttggtcaacaagacggcagtgaggacaatcagacaactactattcaaacaattgttgaggttcaacctcaattagagatggaacttacaccagttgttcagactattgaagtgaatagttttagtggttatttaaaacttactgacaatgtatacattaaaaatgcagacattgtggaagaagctaaaaaggtaaaaccaacagtggttgttaatgcagccaatgtttaccttaaacatggaggaggtgttgcaggagccttaaataaggctactaacaatgccatgcaagttgaatctgatgattacatagctactaatggaccacttaaagtgggtggtagttgtgttttaagcggacacaatcttgctaaacactgtcttcatgttgtcggcccaaatgttaacaaaggtgaagacattcaacttcttaagagtgcttatgaaaattttaatcagcacgaagttctacttgcaccattattatcagctggtatttttggtgctgaccctatacattctttaagagtttgtgtagatactgttcgcacaaatgtctacttagctgtctttgataaaaatctctatgacaaacttgtttcaagctttttggaaatgaagagtgaaaagcaagttgaacaaaagatcgctgagattcctaaagaggaagttaagccatttataactgaaagtaaaccttcagttgaacagagaaaacaagatgataagaaaatcaaagcttgtgttgaagaagttacaacaactctggaagaaactaagttcctcacagaaaacttgttactttatattgacattaatggcaatcttcatccagattctgccactcttgttagtgacattgacatcactttcttaaagaaagatgctccatatatagtgggtgatgttgttcaagagggtgttttaactgctgtggttatacctactaaaaaggctggtggcactactgaaatgctagcgaaagctttgagaaaagtgccaacagacaattatataaccacttacccgggtcagggtttaaatggttacactgtagaggaggcaaagacagtgcttaaaaagtgtaaaagtgccttttacattctaccatctattatctctaatgagaagcaagaaattcttggaactgtttcttggaatttgcgagaaatgcttgcacatgcagaagaaacacgcaaattaatgcctgtctgtgtggaaactaaagccatagtttcaactatacagcgtaaatataagggtattaaaatacaagagggtgtggttgattatggtgctagattttacttttacaccagtaaaacaactgtagcgtcacttatcaacacacttaacgatctaaatgaaactcttgttacaatgccacttggctatgtaacacatggcttaaatttggaagaagctgctcggtatatgagatctctcaaagtgccagctacagtttctgtttcttcacctgatgctgttacagcgtataatggttatcttacttcttcttctaaaacacctgaagaacattttattgaaaccatctcacttgctggttcctataaagattggtcctattctggacaatctacacaactaggtatagaatttcttaagagaggtgataaaagtgtatattacactagtaatcctaccacattccacctagatggtgaagttatcacctttgacaatcttaagacacttctttctttgagagaagtgaggactattaaggtgtttacaacagtagacaacattaacctccacacgcaagttgtggacatgtcaatgacatatggacaacagtttggtccaacttatttggatggagctgatgttactaaaataaaacctcataattcacatgaaggtaaaacattttatgttttacctaatgatgacactctacgtgttgaggcttttgagtactaccacacaactgatcctagttttctgggtaggtacatgtcagcattaaatcacactaaaaagtggaaatacccacaagttaatggtttaacttctattaaatgggcagataacaactgttatcttgccactgcattgttaacactccaacaaatagagttgaagtttaatccacctgctctacaagatgcttattacagagcaagggctggtgaagctgctaacttttgtgcacttatcttagcctactgtaataagacagtaggtgagttaggtgatgttagagaaacaatgagttacttgtttcaacatgccaatttagattcttgcaaaagagtcttgaacgtggtgtgtaaaacttgtggacaacagcagacaacccttaagggtgtagaagctgttatgtacatgggcacactttcttatgaacaatttaagaaaggtgttcagataccttgtacgtgtggtaaacaagctacaaaatatctagtacaacaggagtcaccttttgttatgatgtcagcaccacctgctcagtatgaacttaagcatggtacatttacttgtgctagtgagtacactggtaattaccagtgtggtcactataaacatataacttctaaagaaactttgtattgcatagacggtgctttacttacaaagtcctcagaatacaaaggtcctattacggatgttttctacaaagaaaacagttacacaacaaccataaaaccagttacttataaattggatggtgttgtttgtacagaaattgaccctaagttggacaattattataagaaagacaattcttatttcacagagcaaccaattgatcttgtaccaaaccaaccatatccaaacgcaagcttcgataattttaagtttgtatgtgataatatcaaatttgctgatgatttaaaccagttaactggttataagaaacctgcttcaagagagcttaaagttacatttttccctgacttaaatggtgatgtggtggctattgattataaacactacacaccctcttttaagaaaggagctaaattgttacataaacctattgtttggcatgttaacaatgcaactaataaagccacgtataaaccaaatacctggtgtatacgttgtctttggagcacaaaaccagttgaaacatcaaattcgtttgatgtactgaagtcagaggacgcgcagggaatggataatcttgcctgcgaagatctaaaaccagtctctgaagaagtagtggaaaatcctaccatacagaaagacgttcttgagtgtaatgtgaaaactaccgaagttgtaggagacattatacttaaaccagcaaataatagtttaaaaattacagaagaggttggccacacagatctaatggctgcttatgtagacaattctagtcttactattaagaaacctaatgaattatctagagtattaggtttgaaaacccttgctactcatggtttagctgctgttaatagtgtcccttgggatactatagctaattatgctaagccttttcttaacaaagttgttagtacaactactaacatagttacacggtgtttaaaccgtgtttgtactaattatatgccttatttctttactttattgctacaattgtgtacttttactagaagtacaaattctagaattaaagcatctatgccgactactatagcaaagaatactgttaagagtgtcggtaaattttgtctagaggcttcatttaattatttgaagtcacctaatttttctaaactgataaatattataatttggtttttactattaagtgtttgcctaggttctttaatctactcaaccgctgctttaggtgttttaatgtctaatttaggcatgccttcttactgtactggttacagagaaggctatttgaactctactaatgtcactattgcaacctactgtactggttctataccttgtagtgtttgtcttagtggtttagattctttagacacctatccttctttagaaactatacaaattaccatttcatcttttaaatgggatttaactgcttttggcttagttgcagagtggtttttggcatatattcttttcactaggtttttctatgtacttggattggctgcaatcatgcaattgtttttcagctattttgcagtacattttattagtaattcttggcttatgtggttaataattaatcttgtacaaatggccccgatttcagctatggttagaatgtacatcttctttgcatcattttattatgtatggaaaagttatgtgcatgttgtagacggttgtaattcatcaacttgtatgatgtgttacaaacgtaatagagcaacaagagtcgaatgtacaactattgttaatggtgttagaaggtccttttatgtctatgctaatggaggtaaaggcttttgcaaactacacaattggaattgtgttaattgtgatacattctgtgctggtagtacatttattagtgatgaagttgcgagagacttgtcactacagtttaaaagaccaataaatcctactgaccagtcttcttacatcgttgatagtgttacagtgaagaatggttccatccatctttactttgataaagctggtcaaaagacttatgaaagacattctctctctcattttgttaacttagacaacctgagagctaataacactaaaggttcattgcctattaatgttatagtttttgatggtaaatcaaaatgtgaagaatcatctgcaaaatcagcgtctgtttactacagtcagcttatgtgtcaacctatactgttactagatcaggcattagtgtctgatgttggtgatagtgcggaagttgcagttaaaatgtttgatgcttacgttaatacgttttcatcaacttttaacgtaccaatggaaaaactcaaaacactagttgcaactgcagaagctgaacttgcaaagaatgtgtccttagacaatgtcttatctacttttatttcagcagctcggcaagggtttgttgattcagatgtagaaactaaagatgttgttgaatgtcttaaattgtcacatcaatctgacatagaagttactggcgatagttgtaataactatatgctcacctataacaaagttgaaaacatgacaccccgtgaccttggtgcttgtattgactgtagtgcgcgtcatattaatgcgcaggtagcaaaaagtcacaacattgctttgatatggaacgttaaagatttcatgtcattgtctgaacaactacgaaaacaaatacgtagtgctgctaaaaagaataacttaccttttaagttgacatgtgcaactactagacaagttgttaatgttgtaacaacaaagatagcacttaagggtggtaaaattgttaataattggttgaagcagttaattaaagttacacttgtgttcctttttgttgctgctattttctatttaataacacctgttcatgtcatgtctaaacatactgacttttcaagtgaaatcataggatacaaggctattgatggtggtgtcactcgtgacatagcatctacagatacttgttttgctaacaaacatgctgattttgacacatggtttagccagcgtggtggtagttatactaatgacaaagcttgcccattgattgctgcagtcataacaagagaagtgggttttgtcgtgcctggtttgcctggcacgatattacgcacaactaatggtgactttttgcatttcttacctagagtttttagtgcagttggtaacatctgttacacaccatcaaaacttatagagtacactgactttgcaacatcagcttgtgttttggctgctgaatgtacaatttttaaagatgcttctggtaagccagtaccatattgttatgataccaatgtactagaaggttctgttgcttatgaaagtttacgccctgacacacgttatgtgctcatggatggctctattattcaatttcctaacacctaccttgaaggttctgttagagtggtaacaacttttgattctgagtactgtaggcacggcacttgtgaaagatcagaagctggtgtttgtgtatctactagtggtagatgggtacttaacaatgattattacagatctttaccaggagttttctgtggtgtagatgctgtaaatttacttactaatatgtttacaccactaattcaacctattggtgctttggacatatcagcatctatagtagctggtggtattgtagctatcgtagtaacatgccttgcctactattttatgaggtttagaagagcttttggtgaatacagtcatgtagttgcctttaatactttactattccttatgtcattcactgtactctgtttaacaccagtttactcattcttacctggtgtttattctgttatttacttgtacttgacattttatcttactaatgatgtttcttttttagcacatattcagtggatggttatgttcacacctttagtacctttctggataacaattgcttatatcatttgtatttccacaaagcatttctattggttctttagtaattacctaaagagacgtgtagtctttaatggtgtttcctttagtacttttgaagaagctgcgctgtgcacctttttgttaaataaagaaatgtatctaaagttgcgtagtgatgtgctattacctcttacgcaatataatagatacttagctctttataataagtacaagtattttagtggagcaatggatacaactagctacagagaagctgcttgttgtcatctcgcaaaggctctcaatgacttcagtaactcaggttctgatgttctttaccaaccaccacaaacctctatcacctcagctgttttgcagagtggttttagaaaaatggcattcccatctggtaaagttgagggttgtatggtacaagtaacttgtggtacaactacacttaacggtctttggcttgatgacgtagtttactgtccaagacatgtgatctgcacctctgaagacatgcttaaccctaattatgaagatttactcattcgtaagtctaatcataatttcttggtacaggctggtaatgttcaactcagggttattggacattctatgcaaaattgtgtacttaagcttaaggttgatacagccaatcctaagacacctaagtataagtttgttcgcattcaaccaggacagactttttcagtgttagcttgttacaatggttcaccatctggtgtttaccaatgtgctatgaggcccaatttcactattaagggttcattccttaatggttcatgtggtagtgttggttttaacatagattatgactgtgtctctttttgttacatgcaccatatggaattaccaactggagttcatgctggcacagacttagaaggtaacttttatggaccttttgttgacaggcaaacagcacaagcagctggtacggacacaactattacagttaatgttttagcttggttgtacgctgctgttataaatggagacaggtggtttctcaatcgatttaccacaactcttaatgactttaaccttgtggctatgaagtacaattatgaacctctaacacaagaccatgttgacatactaggacctctttctgctcaaactggaattgccgttttagatatgtgtgcttcattaaaagaattactgcaaaatggtatgaatggacgtaccatattgggtagtgctttattagaagatgaatttacaccttttgatgttgttagacaatgctcaggtgttactttccaaagtgcagtgaaaagaacaatcaagggtacacaccactggttgttactcacaattttgacttcacttttagttttagtccagagtactcaatggtctttgttcttttttttgtatgaaaatgcctttttaccttttgctatgggtattattgctatgtctgcttttgcaatgatgtttgtcaaacataagcatgcatttctctgtttgtttttgttaccttctcttgccactgtagcttattttaatatggtctatatgcctgctagttgggtgatgcgtattatgacatggttggatatggttgatactagtttgtctggttttaagctaaaagactgtgttatgtatgcatcagctgtagtgttactaatccttatgacagcaagaactgtgtatgatgatggtgctaggagagtgtggacacttatgaatgtcttgacactcgtttataaagtttattatggtaatgctttagatcaagccatttccatgtgggctcttataatctctgttacttctaactactcaggtgtagttacaactgtcatgtttttggccagaggtattgtttttatgtgtgttgagtattgccctattttcttcataactggtaatacacttcagtgtataatgctagtttattgtttcttaggctatttttgtacttgttactttggcctcttttgtttactcaaccgctactttagactgactcttggtgtttatgattacttagtttctacacaggagtttagatatatgaattcacagggactactcccacccaagaatagcatagatgccttcaaactcaacattaaattgttgggtgttggtggcaaaccttgtatcaaagtagccactgtacagtctaaaatgtcagatgtaaagtgcacatcagtagtcttactctcagttttgcaacaactcagagtagaatcatcatctaaattgtgggctcaatgtgtccagttacacaatgacattctcttagctaaagatactactgaagcctttgaaaaaatggtttcactactttctgttttgctttccatgcagggtgctgtagacataaacaagctttgtgaagaaatgctggacaacagggcaaccttacaagctatagcctcagagtttagttcccttccatcatatgcagcttttgctactgctcaagaagcttatgagcaggctgttgctaatggtgattctgaagttgttcttaaaaagttgaagaagtctttgaatgtggctaaatctgaatttgaccgtgatgcagccatgcaacgtaagttggaaaagatggctgatcaagctatgacccaaatgtataaacaggctagatctgaggacaagagggcaaaagttactagtgctatgcagacaatgcttttcactatgcttagaaagttggataatgatgcactcaacaacattatcaacaatgcaagagatggttgtgttcccttgaacataatacctcttacaacagcagccaaactaatggttgtcataccagactataacacatataaaaatacgtgtgatggtacaacatttacttatgcatcagcattgtgggaaatccaacaggttgtagatgcagatagtaaaattgttcaacttagtgaaattagtatggacaattcacctaatttagcatggcctcttattgtaacagctttaagggccaattctgctgtcaaattacagaataatgagcttagtcctgttgcactacgacagatgtcttgtgctgccggtactacacaaactgcttgcactgatgacaatgcgttagcttactacaacacaacaaagggaggtaggtttgtacttgcactgttatccgatttacaggatttgaaatgggctagattccctaagagtgatggaactggtactatctatacagaactggaaccaccttgtaggtttgttacagacacacctaaaggtcctaaagtgaagtatttatactttattaaaggattaaacaacctaaatagaggtatggtacttggtagtttagctgccacagtacgtctacaagctggtaatgcaacagaagtgcctgccaattcaactgtattatctttctgtgcttttgctgtagatgctgctaaagcttacaaagattatctagctagtgggggacaaccaatcactaattgtgttaagatgttgtgtacacacactggtactggtcaggcaataacagttacaccggaagccaatatggatcaagaatcctttggtggtgcatcgtgttgtctgtactgccgttgccacatagatcatccaaatcctaaaggattttgtgacttaaaaggtaagtatgtacaaatacctacaacttgtgctaatgaccctgtgggttttacacttaaaaacacagtctgtaccgtctgcggtatgtggaaaggttatggctgtagttgtgatcaactccgcgaacccatgcttcagtcagctgatgcacaatcgtttttaaacgggtttgcggtgtaagtgcagcccgtcttacaccgtgcggcacaggcactagtactgatgtcgtatacagggcttttgacatctacaatgataaagtagctggttttgctaaattcctaaaaactaattgttgtcgcttccaagaaaaggacgaagatgacaatttaattgattcttactttgtagttaagagacacactttctctaactaccaacatgaagaaacaatttataatttacttaaggattgtccagctgttgctaaacatgacttctttaagtttagaatagacggtgacatggtaccacatatatcacgtcaacgtcttactaaatacacaatggcagacctcgtctatgctttaaggcattttgatgaaggtaattgtgacacattaaaagaaatacttgtcacatacaattgttgtgatgatgattatttcaataaaaaggactggtatgattttgtagaaaacccagatatattacgcgtatacgccaacttaggtgaacgtgtacgccaagctttgttaaaaacagtacaattctgtgatgccatgcgaaatgctggtattgttggtgtactgacattagataatcaagatctcaatggtaactggtatgatttcggtgatttcatacaaaccacgccaggtagtggagttcctgttgtagattcttattattcattgttaatgcctatattaaccttgaccagggctttaactgcagagtcacatgttgacactgacttaacaaagccttacattaagtgggatttgttaaaatatgacttcacggaagagaggttaaaactctttgaccgttattttaaatattgggatcagacataccacccaaattgtgttaactgtttggatgacagatgcattctgcattgtgcaaactttaatgttttattctctacagtgttcccacctacaagttttggaccactagtgagaaaaatatttgttgatggtgttccatttgtagtttcaactggataccacttcagagagctaggtgttgtacataatcaggatgtaaacttacatagctctagacttagttttaaggaattacttgtgtatgctgctgaccctgctatgcacgctgcttctggtaatctattactagataaacgcactacgtgcttttcagtagctgcacttactaacaatgttgcttttcaaactgtcaaacccggtaattttaacaaagacttctatgactttgctgtgtctaagggtttctttaaggaaggaagttctgttgaattaaaacacttcttctttgctcaggatggtaatgctgctatcagcgattatgactactatcgttataatctaccaacaatgtgtgatatcagacaactactatttgtagttgaagttgttgataagtactttgattgttacgatggtggctgtattaatgctaaccaagtcatcgtcaacaacctagacaaatcagctggttttccatttaataaatggggtaaggctagactttattatgattcaatgagttatgaggatcaagatgcacttttcgcatatacaaaacgtaatgtcatccctactataactcaaatgaatcttaagtatgccattagtgcaaagaatagagctcgcaccgtagctggtgtctctatctgtagtactatgaccaatagacagtttcatcaaaaattattgaaatcaatagccgccactagaggagctactgtagtaattggaacaagcaaattctatggtggttggcacaacatgttaaaaactgtttatagtgatgtagaaaaccctcaccttatgggttgggattatcctaaatgtgatagagccatgcctaacatgcttagaattatggcctcacttgttcttgctcgcaaacatacaacgtgttgtagcttgtcacaccgtttctatagattagctaatgagtgtgctcaagtattgagtgaaatggtcatgtgtggcggttcactatatgttaaaccaggtggaacctcatcaggagatgccacaactgcttatgctaatagtgtttttaacatttgtcaagctgtcacggccaatgttaatgcacttttatctactgatggtaacaaaattgccgataagtatgtccgcaatttacaacacagactttatgagtgtctctatagaaatagagatgttgacacagactttgtgaatgagttttacgcatatttgcgtaaacatttctcaatgatgatactctctgacgatgctgttgtgtgtttcaatagcacttatgcatctcaaggtctagtggctagcataaagaactttaagtcagttctttattatcaaaacaatgtttttatgtctgaagcaaaatgttggactgagactgaccttactaaaggacctcatgaattttgctctcaacatacaatgctagttaaacagggtgatgattatgtgtaccttccttacccagatccatcaagaatcctaggggccggctgttttgtagatgatatcgtaaaaacagatggtacacttatgattgaacggttcgtgtctttagctatagatgcttacccacttactaaacatcctaatcaggagtatgctgatgtctttcatttgtacttacaatacataagaaagctacatgatgagttaacaggacacatgttagacatgtattctgttatgcttactaatgataacacttcaaggtattgggaacctgagttttatgaggctatgtacacaccgcatacagtcttacaggctgttggggcttgtgttctttgcaattcacagacttcattaagatgtggtgcttgcatacgtagaccattcttatgttgtaaatgctgttacgaccatgtcatatcaacatcacataaattagtcttgtctgttaatccgtatgtttgcaatgctccaggttgtgatgtcacagatgtgactcaactttacttaggaggtatgagctattattgtaaatcacataaaccacccattagttttccattgtgtgctaatggacaagtttttggtttatataaaaatacatgtgttggtagcgataatgttactgactttaatgcaattgcaacatgtgactggacaaatgctggtgattacattttagctaacacctgtactgaaagactcaagctttttgcagcagaaacgctcaaagctactgaggagacatttaaactgtcttatggtattgctactgtacgtgaagtgctgtctgacagagaattacatctttcatgggaagttggtaaacctagaccaccacttaaccgaaattatgtctttactggttatcgtgtaactaaaaacagtaaagtacaaataggagagtacacctttgaaaaaggtgactatggtgatgctgttgtttaccgaggtacaacaacttacaaattaaatgttggtgattattttgtgctgacatcacatacagtaatgccattaagtgcacctacactagtgccacaagagcactatgttagaattactggcttatacccaacactcaatatctcagatgagttttctagcaatgttgcaaattatcaaaaggttggtatgcaaaagtattctacactccagggaccacctggtactggtaagagtcattttgctattggcctagctctctactacccttctgctcgcatagtgtatacagcttgctctcatgccgctgttgatgcactatgtgagaaggcattaaaatatttgcctatagataaatgtagtagaattatacctgcacgtgctcgtgtagagtgttttgataaattcaaagtgaattcaacattagaacagtatgtcttttgtactgtaaatgcattgcctgagacgacagcagatatagttgtctttgatgaaatttcaatggccacaaattatgatttgagtgttgtcaatgccagattacgtgctaagcactatgtgtacattggcgaccctgctcaattacctgcaccacgcacattgctaactaagggcacactagaaccagaatatttcaattcagtgtgtagacttatgaaaactataggtccagacatgttcctcggaacttgtcggcgttgtcctgctgaaattgttgacactgtgagtgctttggtttatgataataagcttaaagcacataaagacaaatcagctcaatgctttaaaatgttttataagggtgttatcacgcatgatgtttcatctgcaattaacaggccacaaataggcgtggtaagagaattccttacacgtaaccctgcttggagaaaagctgtctttatttcaccttataattcacagaatgctgtagcctcaaagattttgggactaccaactcaaactgttgattcatcacagggctcagaatatgactatgtcatattcactcaaaccactgaaacagctcactcttgtaatgtaaacagatttaatgttgctattaccagagcaaaagtaggcatactttgcataatgtctgatagagacctttatgacaagttgcaatttacaagtcttgaaattccacgtaggaatgtggcaactttacaagctgaaaatgtaacaggactctttaaagattgtagtaaggtaatcactgggttacatcctacacaggcacctacacacctcagtgttgacactaaattcaaaactgaaggtttatgtgttgacatacctggcatacctaaggacatgacctatagaagactcatctctatgatgggttttaaaatgaattatcaagttaatggttaccctaacatgtttatcacccgcgaagaagctataagacatgtacgtgcatggattggcttcgatgtcgaggggtgtcatgctactagagaagctgttggtaccaatttacctttacagctaggtttttctacaggtgttaacctagttgctgtacctacaggttatgttgatacacctaataatacagatttttccagagttagtgctaaaccaccgcctggagatcaatttaaacacctcataccacttatgtacaaaggacttccttggaatgtagtgcgtataaagattgtacaaatgttaagtgacacacttaaaaatctctctgacagagtcgtatttgtcttatgggcacatggctttgagttgacatctatgaagtattttgtgaaaataggacctgagcgcacctgttgtctatgtgatagacgtgccacatgcttttccactgcttcagacacttatgcctgttggcatcattctattggatttgattacgtctataatccgtttatgattgatgttcaacaatggggttttacaggtaacctacaaagcaaccatgatctgtattgtcaagtccatggtaatgcacatgtagctagttgtgatgcaatcatgactaggtgtctagctgtccacgagtgctttgttaagcgtgttgactggactattgaatatcctataattggtgatgaactgaagattaatgcggcttgtagaaaggttcaacacatggttgttaaagctgcattattagcagacaaattcccagttcttcacgacattggtaaccctaaagctattaagtgtgtacctcaagctgatgtagaatggaagttctatgatgcacagccttgtagtgacaaagcttataaaatagaagaattattctattcttatgccacacattctgacaaattcacagatggtgtatgcctattttggaattgcaatgtcgatagatatcctgctaattccattgtttgtagatttgacactagagtgctatctaaccttaacttgcctggttgtgatggtggcagtttgtatgtaaataaacatgcattccacacaccagcttttgataaaagtgcttttgttaatttaaaacaattaccatttttctattactctgacagtccatgtgagtctcatggaaaacaagtagtgtcagatatagattatgtaccactaaagtctgctacgtgtataacacgttgcaatttaggtggtgctgtctgtagacatcatgctaatgagtacagattgtatctcgatgcttataacatgatgatctcagctggctttagcttgtgggtttacaaacaatttgatacttataacctctggaacacttttacaagacttcagagtttagaaaatgtggcttttaatgttgtaaataagggacactttgatggacaacagggtgaagtaccagtttctatcattaataacactgtttacacaaaagttgatggtgttgatgtagaattgtttgaaaataaaacaacattacctgttaatgtagcatttgagctttgggctaagcgcaacattaaaccagtaccagaggtgaaaatactcaataatttgggtgtggacattgctgctaatactgtgatctgggactacaaaagagatgctccagcacatatatctactattggtgtttgttctatgactgacatagccaagaaaccaactgaaacgatttgtgcaccactcactgtcttttttgatggtagagttgatggtcaagtagacttatttagaaatgcccgtaatggtgttcttattacagaaggtagtgttaaaggtttacaaccatctgtaggtcccaaacaagctagtcttaatggagtcacattaattggagaagccgtaaaaacacagttcaattattataagaaagttgatggtgttgtccaacaattacctgaaacttactttactcagagtagaaatttacaagaatttaaacccaggagtcaaatggaaattgatttcttagaattagctatggatgaattcattgaacggtataaattagaaggctatgccttcgaacatatcgtttatggagattttagtcatagtcagttaggtggtttacatctactgattggactagctaaacgttttaaggaatcaccttttgaattagaagattttattcctatggacagtacagttaaaaactatttcataacagatgcgcaaacaggttcatctaagtgtgtgtgttctgttattgatttattacttgatgattttgttgaaataataaaatcccaagatttatctgtagtttctaaggttgtcaaagtgactattgactatacagaaatttcatttatgctttggtgtaaagatggccatgtagaaacattttacccaaaattacaatctagtcaagcgtggcaaccgggtgttgctatgcctaatctttacaaaatgcaaagaatgctattagaaaagtgtgaccttcaaaattatggtgatagtgcaacattacctaaaggcataatgatgaatgtcgcaaaatatactcaactgtgtcaatatttaaacacattaacattagctgtaccctataatatgagagttatacattttggtgctggttctgataaaggagttgcaccaggtacagctgttttaagacagtggttgcctacgggtacgctgcttgtcgattcagatcttaatgactttgtctctgatgcagattcaactttgattggtgattgtgcaactgtacatacagctaataaatgggatctcattattagtgatatgtacgaccctaagactaaaaatgttacaaaagaaaatgactctaaagagggttttttcacttacatttgtgggtttatacaacaaaagctagctcttggaggttccgtggctataaagataacagaacattcttggaatgctgatctttataagctcatgggacacttcgcatggtggacagcctttgttactaatgtgaatgcgtcatcatctgaagcatttttaattggatgtaattatcttggcaaaccacgcgaacaaatagatggttatgtcatgcatgcaaattacatattttggaggaatacaaatccaattcagttgtcttcctattctttatttgacatgagtaaatttccccttaaattaaggggtactgctgttatgtctttaaaagaaggtcaaatcaatgatatgattttatctcttcttagtaaaggtagacttataattagagaaaacaacagagttgttatttctagtgatgttcttgttaacaactaaacgaacaatgtttgtttttcttgttttattgccactagtctctagtcagtgtgttaatcttacaaccagaactcaattaccccctgcatacactaattctttcacacgtggtgtttattaccctgacaaagttttcagatcctcagttttacattcaactcaggacttgttcttacctttcttttccaatgttacttggttccatgctatacatgtctctgggaccaatggtactaagaggtttgataaccctgtcctaccatttaatgatggtgtttattttgcttccactgagaagtctaacataataagaggctggatttttggtactactttagattcgaagacccagtccctacttattgttaataacgctactaatgttgttattaaagtctgtgaatttcaattttgtaatgatccatttttgggtgtttattaccacaaaaacaacaaaagttggatggaaagtgagttcagagtttattctagtgcgaataattgcacttttgaatatgtctctcagccttttcttatggaccttgaaggaaaacagggtaatttcaaaaatcttagggaatttgtgtttaagaatattgatggttattttaaaatatattctaagcacacgcctattaatttagtgcgtgatctccctcagggtttttcggctttagaaccattggtagatttgccaataggtattaacatcactaggtttcaaactttacttgctttacatagaagttatttgactcctggtgattcttcttcaggttggacagctggtgctgcagcttattatgtgggttatcttcaacctaggacttttctattaaaatataatgaaaatggaaccattacagatgctgtagactgtgcacttgaccctctctcagaaacaaagtgtacgttgaaatccttcactgtagaaaaaggaatctatcaaacttctaactttagagtccaaccaacagaatctattgttagatttcctaatattacaaacttgtgcccttttggtgaagtttttaacgccaccagatttgcatctgtttatgcttggaacaggaagagaatcagcaactgtgttgctgattattctgtcctatataattccgcatcattttccacttttaagtgttatggagtgtctcctactaaattaaatgatctctgctttactaatgtctatgcagattcatttgtaattagaggtgatgaagtcagacaaatcgctccagggcaaactggaaagattgctgattataattataaattaccagatgattttacaggctgcgttatagcttggaattctaacaatcttgattctaaggttggtggtaattataattacctgtatagattgtttaggaagtctaatctcaaaccttttgagagagatatttcaactgaaatctatcaggccggtagcacaccttgtaatggtgttgaaggttttaattgttactttcctttacaatcatatggtttccaacccactaatggtgttggttaccaaccatacagagtagtagtactttcttttgaacttctacatgcaccagcaactgtttgtggacctaaaaagtctactaatttggttaaaaacaaatgtgtcaatttcaacttcaatggtttaacaggcacaggtgttcttactgagtctaacaaaaagtttctgcctttccaacaatttggcagagacattgctgacactactgatgctgtccgtgatccacagacacttgagattcttgacattacaccatgttcttttggtggtgtcagtgttataacaccaggaacaaatacttctaaccaggttgctgttctttatcaggatgttaactgcacagaagtccctgttgctattcatgcagatcaacttactcctacttggcgtgtttattctacaggttctaatgtttttcaaacacgtgcaggctgtttaataggggctgaacatgtcaacaactcatatgagtgtgacatacccattggtgcaggtatatgcgctagttatcagactcagactaattctcctcggcgggcacgtagtgtagctagtcaatccatcattgcctacactatgtcacttggtgcagaaaattcagttgcttactctaataactctattgccatacccacaaattttactattagtgttaccacagaaattctaccagtgtctatgaccaagacatcagtagattgtacaatgtacatttgtggtgattcaactgaatgcagcaatcttttgttgcaatatggcagtttttgtacacaattaaaccgtgctttaactggaatagctgttgaacaagacaaaaacacccaagaagtttttgcacaagtcaaacaaatttacaaaacaccaccaattaaagattttggtggttttaatttttcacaaatattaccagatccatcaaaaccaagcaagaggtcatttattgaagatctacttttcaacaaagtgacacttgcagatgctggcttcatcaaacaatatggtgattgccttggtgatattgctgctagagacctcatttgtgcacaaaagtttaacggccttactgttttgccacctttgctcacagatgaaatgattgctcaatacacttctgcactgttagcgggtacaatcacttctggttggacctttggtgcaggtgctgcattacaaataccatttgctatgcaaatggcttataggtttaatggtattggagttacacagaatgttctctatgagaaccaaaaattgattgccaaccaatttaatagtgctattggcaaaattcaagactcactttcttccacagcaagtgcacttggaaaacttcaagatgtggtcaaccaaaatgcacaagctttaaacacgcttgttaaacaacttagctccaattttggtgcaatttcaagtgttttaaatgatatcctttcacgtcttgacaaagttgaggctgaagtgcaaattgataggttgatcacaggcagacttcaaagtttgcagacatatgtgactcaacaattaattagagctgcagaaatcagagcttctgctaatcttgctgctactaaaatgtcagagtgtgtacttggacaatcaaaaagagttgatttttgtggaaagggctatcatcttatgtccttccctcagtcagcacctcatggtgtagtcttcttgcatgtgacttatgtccctgcacaagaaaagaacttcacaactgctcctgccatttgtcatgatggaaaagcacactttcctcgtgaaggtgtctttgtttcaaatggcacacactggtttgtaacacaaaggaatttttatgaaccacaaatcattactacagacaacacatttgtgtctggtaactgtgatgttgtaataggaattgtcaacaacacagtttatgatcctttgcaacctgaattagactcattcaaggaggagttagataaatattttaagaatcatacatcaccagatgttgatttaggtgacatctctggcattaatgcttcagttgtaaacattcaaaaagaaattgaccgcctcaatgaggttgccaagaatttaaatgaatctctcatcgatctccaagaacttggaaagtatgagcagtatataaaatggccatggtacatttggctaggttttatagctggcttgattgccatagtaatggtgacaattatgctttgctgtatgaccagttgctgtagttgtctcaagggctgttgttcttgtggatcctgctgcaaatttgatgaagacgactctgagccagtgctcaaaggagtcaaattacattacacataaacgaacttatggatttgtttatgagaatcttcacaattggaactgtaactttgaagcaaggtgaaatcaaggatgctactccttcagattttgttcgcgctactgcaacgataccgatacaagcctcactccctttcggatggcttattgttggcgttgcacttcttgctgtttttcagagcgcttccaaaatcataaccctcaaaaagagatggcaactagcactctccaagggtgttcactttgtttgcaacttgctgttgttgtttgtaacagtttactcacaccttttgctcgttgctgctggccttgaagccccttttctctatctttatgctttagtctacttcttgcagagtataaactttgtaagaataataatgaggctttggctttgctggaaatgccgttccaaaaacccattactttatgatgccaactattttctttgctggcatactaattgttacgactattgtataccttacaatagtgtaacttcttcaattgtcattacttcaggtgatggcacaacaagtcctatttctgaacatgactaccagattggtggttatactgaaaaatgggaatctggagtaaaagactgtgttgtattacacagttacttcacttcagactattaccagctgtactcaactcaattgagtacagacactggtgttgaacatgttaccttcttcatctacaataaaattgttgatgagcctgaagaacatgtccaaattcacacaatcgacggttcatccggagttgttaatccagtaatggaaccaatttatgatgaaccgacgacgactactagcgtgcctttgtaagcacaagctgatgagtacgaacttatgtactcattcgtttcggaagagacaggtacgttaatagttaatagcgtacttctttttcttgctttcgtggtattcttgctagttacactagccatccttactgcgcttcgattgtgtgcgtactgctgcaatattgttaacgtgagtcttgtaaaaccttctttttacgtttactctcgtgttaaaaatctgaattcttctagagttcctgatcttctggtctaaacgaactaaatattatattagtttttctgtttggaactttaattttagccatggcagattccaacggtactattaccgttgaagagcttaaaaagctccttgaacaatggaacctagtaataggtttcctattccttacatggatttgtcttctacaatttgcctatgccaacaggaataggtttttgtatataattaagttaattttcctctggctgttatggccagtaactttagcttgttttgtgcttgctgctgtttacagaataaattggatcaccggtggaattgctatcgcaatggcttgtcttgtaggcttgatgtggctcagctacttcattgcttctttcagactgtttgcgcgtacgcgttccatgtggtcattcaatccagaaactaacattcttctcaacgtgccactccatggcactattctgaccagaccgcttctagaaagtgaactcgtaatcggagctgtgatccttcgtggacatcttcgtattgctggacaccatctaggacgctgtgacatcaaggacctgcctaaagaaatcactgttgctacatcacgaacgctttcttattacaaattgggagcttcgcagcgtgtagcaggtgactcaggttttgctgcatacagtcgctacaggattggcaactataaattaaacacagaccattccagtagcagtgacaatattgctttgcttgtacagtaagtgacaacagatgtttcatctcgttgactttcaggttactatagcagagatattactaattattatgaggacttttaaagtttccatttggaatcttgattacatcataaacctcataattaaaaatttatctaagtcactaactgagaataaatattctcaattagatgaagagcaaccaatggagattgattaaacgaacatgaaaattattcttttcttggcactgataacactcgctacttgtgagctttatcactaccaagagtgtgttagaggtacaacagtacttttaaaagaaccttgctcttctggaacatacgagggcaattcaccatttcatcctctagctgataacaaatttgcactgacttgctttagcactcaatttgcttttgcttgtcctgacggcgtaaaacacgtctatcagttacgtgccagatcagtttcacctaaactgttcatcagacaagaggaagttcaagaactttactctccaatttttcttattgttgcggcaatagtgtttataacactttgcttcacactcaaaagaaagacagaatgattgaactttcattaattgacttctatttgtgctttttagcctttctgctattccttgttttaattatgcttattatcttttggttctcacttgaactgcaagatcataatgaaacttgtcacgcctaaacgaacatgaaatttcttgttttcttaggaatcatcacaactgtagctgcatttcaccaagaatgtagtttacagtcatgtactcaacatcaaccatatgtagttgatgacccgtgtcctattcacttctattctaaatggtatattagagtaggagctagaaaatcagcacctttaattgaattgtgcgtggatgaggctggttctaaatcacccattcagtacatcgatatcggtaattatacagtttcctgtttaccttttacaattaattgccaggaacctaaattgggtagtcttgtagtgcgttgttcgttctatgaagactttttagagtatcatgacgttcgtgttgttttagatttcatctaaacgaacaaactaaaatgtctgataatggaccccaaaatcagcgaaatgcaccccgcattacgtttggtggaccctcagattcaactggcagtaaccagaatggagaacgcagtggggcgcgatcaaaacaacgtcggccccaaggtttacccaataatactgcgtcttggttcaccgctctcactcaacatggcaaggaagaccttaaattccctcgaggacaaggcgttccaattaacaccaatagcagtccagatgaccaaattggctactaccgaagagctaccagacgaattcgtggtggtgacggtaaaatgaaagatctcagtccaagatggtatttctactacctaggaactgggccagaagctggacttccctatggtgctaacaaagacggcatcatatgggttgcaactgagggagccttgaatacaccaaaagatcacattggcacccgcaatcctgctaacaatgctgcaatcgtgctacaacttcctcaaggaacaacattgccaaaaggcttctacgcagaagggagcagaggcggcagtcaagcctcttctcgttcctcatcacgtagtcgcaacagttcaagaaattcaactccaggcagcagtaggggaacttctcctgctagaatggctggcaatggcggtgatgctgctcttgctttgctgctgcttgacagattgaaccagcttgagagcaaaatgtctggtaaaggccaacaacaacaaggccaaactgtcactaagaaatctgctgctgaggcttctaagaagcctcggcaaaaacgtactgccactaaagcatacaatgtaacacaagctttcggcagacgtggtccagaacaaacccaaggaaattttggggaccaggaactaatcagacaaggaactgattacaaacattggccgcaaattgcacaatttgcccccagcgcttcagcgttcttcggaatgtcgcgcattggcatggaagtcacaccttcgggaacgtggttgacctacacaggtgccatcaaattggatgacaaagatccaaatttcaaagatcaagtcattttgctgaataagcatattgacgcatacaaaacattcccaccaacagagcctaaaaaggacaaaaagaagaaggctgatgaaactcaagccttaccgcagagacagaagaaacagcaaactgtgactcttcttcctgctgcagatttggatgatttctccaaacaattgcaacaatccatgagcagtgctgactcaactcaggcctaaactcatgcagaccacacaaggcagatgggctatataaacgttttcgcttttccgtttacgatatatagtctactcttgtgcagaatgaattctcgtaactacatagcacaagtagatgtagttaactttaatctcacatagcaatctttaatcagtgtgtaacattagggaggacttgaaagagccaccacattttcaccgaggccacgcggagtacgatcgagtgtacagtgaacaatgctagggagagctgcctatatggaagagccctaatgtgtaaaattaattttagtagtgctatccccatgtgattttaatagcttcttaggagaatgacaaaaaaaaaaaaaaaaaaaaaaaaaaaaaaaaa

SEQ ID NO: 2 - protein, 7096 aa, SARS-CoV2 [sequence omitted]

SEQ ID NO: 3 - protein, 1273 aa, SARS-CoV2
MFVFLVLLPLVSSQCVNLTTRTQLPPAYTNSFTRGVYYPDKVFRSSVLHSTQDLFLPFFSNVTWFHAIHVSGTNGTKRFDNPVLPFNDGVYFASTEKSNIIRGWIFGTTLDSKTQSLLIVNNATNVVIKVCEFQFCNDPFLGVYYHKNNKSWMESEFRVYSSANNCTFEYVSQPFLMDLEGKQGNFKNLREFVFKNIDGYFKIYSKHTPINLVRDLPQGFSALEPLVDLPIGINITRFQTLLALHRSYLTPGDSSSGWTAGAAAYYVGYLQPRTFLLKYNENGTITDAVDCALDPLSETKCTLKSFTVEKGIYQTSNFRVQPTESIVRFPNITNLCPFGEVFNATRFASVYAWNRKRISNCVADYSVLYNSASFSTFKCYGVSPTKLNDLCFTNVYADSFVIRGDEVRQIAPGQTGKIADYNYKLPDDFTGCVIAWNSNNLDSKVGGNYNYLYRLFRKSNLKPFERDISTEIYQAGSTPCNGVEGFNCYFPLQSYGFQPTNGVGYQPYRVVVLSFELLHAPATVCGPKKSTNLVKNKCVNFNFNGLTGTGVLTESNKKFLPFQQFGRDIADTTDAVRDPQTLEILDITPCSFGGVSVITPGTNTSNQVAVLYQDVNCTEVPVAIHADQLTPTWRVYSTGSNVFQTRAGCLIGAEHVNNSYECDIPIGAGICASYQTQTNSPRRARSVASQSIIAYTMSLGAENSVAYSNNSIAIPTNFTISVTTEILPVSMTKTSVDCTMYICGDSTECSNLLLQYGSFCTQLNRALTGIAVEQDKNTQEVFAQVKQIYKTPPIKDFGGFNFSQILPDPSKPSKRSFIEDLLFNKVTLADAGFIKQYGDCLGDIAARDLICAQKFNGLTVLPPLLTDEMIAQYTSALLAGTITSGWTFGAGAALQIPFAMQMAYRFNGIGVTQNVLYENQKLIANQFNSAIGKIQDSLSSTASALGKLQDVVNQNAQALNTLVKQLSSNFGAISSVLNDILSRLDKVEAEVQIDRLITGRLQSLQTYVTQQLIRAAEIRASANLAATKMSECVLGQSKRVDFCGKGYHLMSFPQSAPHGVVFLHVTYVPAQEKNFTTAPAICHDGKAHFPREGVFVSNGTHWFVTQRNFYEPQIITTDNTFVSGNCDVVIGIVNNTVYDPLQPELDSFKEELDKYFKNHTSPDVDLGDISGINASVVNIQKEIDRLNEVAKNLNESLIDLQELGKYEQYIKWPWYIWLGFIAGLIAIVMVTIMLCCMTSCCSCLKGCCSCGSCCKFDEDDSEPVLKGVKLHYT

SEQ ID NO: 4 - DNA, 22 bp, Artificial Sequence
  Synthetic
tgactgtgaacgttcgagatga

SEQ ID NO: 5 - protein, 11 aa, Artificial Sequence
  Synthetic
KLKLLLLLKLK

SEQ ID NO: 6 - DNA, 26 bp, Artificial Sequence
  Synthetic
  misc_feature (1)..(26): n=deoxyinosine
ncncncncncncncncncncncncnc

SEQ ID NO: 7 - DNA, 20 bp, Artificial Sequence
  Synthetic
tccatgacgttcctgacgtt

SEQ ID NO: 8 - DNA, 24 bp, Artificial Sequence
  Synthetic
tcgtcgttttgtcgttttgtcgtt

SEQ ID NO: 9 - DNA, 29867 bp, SARS-CoV2
  misc_feature (11083)..(11083): n is a, c, g, or t
attaaaggtttataccttcccaggtaacaaaccaaccaactttcgatctcttgtagatctgttctctaaacgaactttaaaatctgtgtggctgtcactcggctgcatgcttagtgcactcacgcagtataattaataactaattactgtcgttgacaggacacgagtaactcgtctatcttctgcaggctgcttacggtttcgtccgtgttgcagccgatcatcagcacatctaggtttcgtccgggtgtgaccgaaaggtaagatggagagccttgtccctggtttcaacgagaaaacacacgtccaactcagtttgcctgttttacaggttcgcgacgtgctcgtacgtggctttggagactccgtggaggaggtcttatcagaggcacgtcaacatcttaaagatggcacttgtggcttagtagaagttgaaaaaggcgttttgcctcaacttgaacagccctatgtgttcatcaaacgttcggatgctcgaactgcacctcatggtcatgttatggttgagctggtagcagaactcgaaggcattcagtacggtcgtagtggtgagacacttggtgtccttgtccctcatgtgggcgaaataccagtggcttaccgcaaggttcttcttcgtaagaacggtaataaaggagctggtggccatagttacggcgccgatctaaagtcatttgacttaggcgacgagcttggcactgatccttatgaagattttcaagaaaactggaacactaaacatagcagtggtgttacccgtgaactcatgcgtgagcttaacggaggggcatacactcgctatgtcgataacaacttctgtggccctgatggctaccctcttgagtgcattaaagaccttctagcacgtgctggtaaagcttcatgcactttgtccgaacaactggactttattgacactaagaggggtgtatactgctgccgtgaacatgagcatgaaattgcttggtacacggaacgttctgaaaagagctatgaattgcagacaccttttgaaattaaattggcaaagaaatttgacaccttcaatggggaatgtccaaattttgtatttcccttaaattccataatcaagactattcaaccaagggttgaaaagaaaaagcttgatggctttatgggtagaattcgatctgtctatccagttgcgtcaccaaatgaatgcaaccaaatgtgcctttcaactctcatgaagtgtgatcattgtggtgaaacttcatggcagacgggcgattttgttaaagccacttgcgaattttgtggcactgagaatttgactaaagaaggtgccactacttgtggttacttaccccaaaatgctgttgttaaaatttattgtccagcatgtcacaattcagaagtaggacctgagcatagtcttgccgaataccataatgaatctggcttgaaaaccattcttcgtaagggtggtcgcactattgcctttggaggctgtgtgttctcttatgttggttgccataacaagtgtgcctattgggttccacgtgctagcgctaacataggttgtaaccatacaggtgttgttggagaaggttccgaaggtcttaatgacaaccttcttgaaatactccaaaaagagaaagtcaacatcaatattgttggtgactttaaacttaatgaagagatcgccattattttggcatctttttctgcttccacaagtgcttttgtggaaactgtgaaaggtttggattataaagcattcaaacaaattgttgaatcctgtggtaattttaaagttacaaaaggaaaagctaaaaaaggtgcctggaatattggtgaacagaaatcaatactgagtcctctttatgcatttgcatcagaggctgctcgtgttgtacgatcaattttctcccgcactcttgaaactgctcaaaattctgtgcgtgttttacagaaggccgctataacaatactagatggaatttcacagtattcactgagactcattgatgctatgatgttcacatctgatttggctactaacaatctagttgtaatggcctacattacaggtggtgttgttcagttgacttcgcagtggctaactaacatctttggcactgtttatgaaaaactcaaacccgtccttgattggcttgaagagaagtttaaggaaggtgtagagtttcttagagacggttgggaaattgttaaatttatctcaacctgtgcttgtgaaattgtcggtggacaaattgtcacctgtgctaaggaaattaaggagagtgttcagacattctttaagcttgtaaataaatttttggctttgtgtgctgactctatcattattggtggagctaaacttaaagccttgaatttaggtgaaacatttgtcacgcactcaaagggattgtacagaaagtgtgttaaatccagagaagaaactggcctactcatgcctctaaaagccccaaaagaaattatcttcttagagggagaaacacttcccacagaagtgttaacagaggaagttgtcttgaaaactggtgatttacaaccattagaacaacctactagtgaagctgttgaagctccattggttggtacaccagtttgtattaacgggcttatgttgctcgaaatcaaagacacagaaaagtactgtgcccttgcacctaatatgatggtaacaaacaataccttcacactcaaaggcggtgcaccaacaaaggttacttttggtgatgacactgtgatagaagtgcaaggttacaagagtgtgaatatcacttttgaacttgatgaaaggattgataaagtacttaatgagaagtgctctgcctatacagttgaactcggtacagaagtaaatgagttcgcctgtgttgtggcagatgctgtcataaaaactttgcaaccagtatctgaattacttacaccactgggcattgatttagatgagtggagtatggctacatactacttatttgatgagtctggtgagtttaaattggcttcacatatgtattgttctttctaccctccagatgaggatgaagaagaaggtgattgtgaagaagaagagtttgagccatcaactcaatatgagtatggtactgaagatgattaccaaggtaaacctttggaatttggtgccacttctgctgctcttcaacctgaagaagagcaagaagaagattggttagatgatgatagtcaacaaactgttggtcaacaagacggcagtgaggacaatcagacaactactattcaaacaattgttgaggttcaacctcaattagagatggaacttacaccagttgttcagactattgaagtgaatagttttagtggttatttaaaacttactgacaatgtatacattaaaaatgcagacattgtggaagaagctaaaaaggtaaaaccaacagtggttgttaatgcagccaatgtttaccttaaacatggaggaggtgttgcaggagccttaaataaggctactaacaatgccatgcaagttgaatctgatgattacatagctactaatggaccacttaaagtgggtggtagttgtgttttaagcggacacaatcttgctaaacactgtcttcatgttgtcggcccaaatgttaacaaaggtgaagacattcaacttcttaagagtgcttatgaaaattttaatcagcacgaagttctacttgcaccattattatcagctggtatttttggtgctgaccctatacattctttaagagtttgtgtagatactgttcgcacaaatgtctacttagctgtctttgataaaaatctctatgacaaacttgtttcaagctttttggaaatgaagagtgaaaagcaagttgaacaaaagatcgctgagattcctaaagaggaagttaagccatttataactgaaagtaaaccttcagttgaacagagaaaacaagatgataagaaaatcaaagcttgtgttgaagaagttacaacaactctggaagaaactaagttcctcacagaaaacttgttactttatattgacattaatggcaatcttcatccagattctgccactcttgttagtgacattgacatcactttcttaaagaaagatgctccatatatagtgggtgatgttgttcaagagggtgttttaactgctgtggttatacctactaaaaaggctggtggcactactgaaatgctagcgaaagctttgagaaaagtgccaacagacaattatataaccacttacccgggtcagggtttaaatggttacactgtagaggaggcaaagacagtgcttaaaaagtgtaaaagtgccttttacattctaccatctattatctctaatgagaagcaagaaattcttggaactgtttcttggaatttgcgagaaatgcttgcacatgcagaagaaacacgcaaattaatgcctgtctgtgtggaaactaaagccatagtttcaactatacagcgtaaatataagggtattaaaatacaagagggtgtggttgattatggtgctagattttacttttacaccagtaaaacaactgtagcgtcacttatcaacacacttaacgatctaaatgaaactcttgttacaatgccacttggctatgtaacacatggcttaaatttggaagaagctgctcggtatatgagatctctcaaagtgccagctacagtttctgtttcttcacctgatgctgttacagcgtataatggttatcttacttcttcttctaaaacacctgaagaacattttattgaaaccatctcacttgctggttcctataaagattggtcctattctggacaatctacacaactaggtatagaatttcttaagagaggtgataaaagtgtatattacactagtaatcctaccacattccacctagatggtgaagttatcacctttgacaatcttaagacacttctttctttgagagaagtgaggactattaaggtgtttacaacagtagacaacattaacctccacacgcaagttgtggacatgtcaatgacatatggacaacagtttggtccaacttatttggatggagctgatgttactaaaataaaacctcataattcacatgaaggtaaaacattttatgttttacctaatgatgacactctacgtgttgaggcttttgagtactaccacacaactgatcctagttttctgggtaggtacatgtcagcattaaatcacactaaaaagtggaaatacccacaagttaatggtttaacttctattaaatgggcagataacaactgttatcttgccactgcattgttaacactccaacaaatagagttgaagtttaatccacctgctctacaagatgcttattacagagcaagggctggtgaagctgctaacttttgtgcacttatcttagcctactgtaataagacagtaggtgagttaggtgatgttagagaaacaatgagttacttgtttcaacatgccaatttagattcttgcaaaagagtcttgaacgtggtgtgtaaaacttgtggacaacagcagacaacccttaagggtgtagaagctgttatgtacatgggcacactttcttatgaacaatttaagaaaggtgttcagataccttgtacgtgtggtaaacaagctacaaaatatctagtacaacaggagtcaccttttgttatgatgtcagcaccacctgctcagtatgaacttaagcatggtacatttacttgtgctagtgagtacactggtaattaccagtgtggtcactataaacatataacttctaaagaaactttgtattgcatagacggtgctttacttacaaagtcctcagaatacaaaggtcctattacggatgttttctacaaagaaaacagttacacaacaaccataaaaccagttacttataaattggatggtgttgtttgtacagaaattgaccctaagttggacaattattataagaaagacaattcttatttcacagagcaaccaattgatcttgtaccaaaccaaccatatccaaacgcaagcttcgataattttaagtttgtatgtgataatatcaaatttgctgatgatttaaaccagttaactggttataagaaacctgcttcaagagagcttaaagttacatttttccctgacttaaatggtgatgtggtggctattgattataaacactacacaccctcttttaagaaaggagctaaattgttacataaacctattgtttggcatgttaacaatgcaactaataaagccacgtataaaccaaatacctggtgtatacgttgtctttggagcacaaaaccagttgaaacatcaaattcgtttgatgtactgaagtcagaggacgcgcagggaatggataatcttgcctgcgaagatctaaaaccagtctctgaagaagtagtggaaaatcctaccatacagaaagacgttcttgagtgtaatgtgaaaactaccgaagttgtaggagacattatacttaaaccagcaaataatagtttaaaaattacagaagaggttggccacacagatctaatggctgcttatgtagacaattctagtcttactattaagaaacctaatgaattatctagagtattaggtttgaaaacccttgctactcatggtttagctgctgttaatagtgtcccttgggatactatagctaattatgctaagccttttcttaacaaagttgttagtacaactactaacatagttacacggtgtttaaaccgtgtttgtactaattatatgccttatttctttactttattgctacaattgtgtacttttactagaagtacaaattctagaattaaagcatctatgccgactactatagcaaagaatactgttaagagtgtcggtaaattttgtctagaggcttcatttaattatttgaagtcacctaatttttctaaactgataaatattataatttggtttttactattaagtgtttgcctaggttctttaatctactcaaccgctgctttaggtgttttaatgtctaatttaggcatgccttcttactgtactggttacagagaaggctatttgaactctactaatgtcactattgcaacctactgtactggttctataccttgtagtgtttgtcttagtggtttagattctttagacacctatccttctttagaaactatacaaattaccatttcatcttttaaatgggatttaactgcttttggcttagttgcagagtggtttttggcatatattcttttcactaggtttttctatgtacttggattggctgcaatcatgcaattgtttttcagctattttgcagtacattttattagtaattcttggcttatgtggttaataattaatcttgtacaaatggccccgatttcagctatggttagaatgtacatcttctttgcatcattttattatgtatggaaaagttatgtgcatgttgtagacggttgtaattcatcaacttgtatgatgtgttacaaacgtaatagagcaacaagagtcgaatgtacaactattgttaatggtgttagaaggtccttttatgtctatgctaatggaggtaaaggcttttgcaaactacacaattggaattgtgttaattgtgatacattctgtgctggtagtacatttattagtgatgaagttgcgagagacttgtcactacagtttaaaagaccaataaatcctactgaccagtcttcttacatcgttgatagtgttacagtgaagaatggttccatccatctttactttgataaagctggtcaaaagacttatgaaagacattctctctctcattttgttaacttagacaacctgagagctaataacactaaaggttcattgcctattaatgttatagtttttgatggtaaatcaaaatgtgaagaatcatctgcaaaatcagcgtctgtttactacagtcagcttatgtgtcaacctatactgttactagatcaggcattagtgtctgatgttggtgatagtgcggaagttgcagttaaaatgtttgatgcttacgttaatacgttttcatcaacttttaacgtaccaatggaaaaactcaaaacactagttgcaactgcagaagctgaacttgcaaagaatgtgtccttagacaatgtcttatctacttttatttcagcagctcggcaagggtttgttgattcagatgtagaaactaaagatgttgttgaatgtcttaaattgtcacatcaatctgacatagaagttactggcgatagttgtaataactatatgctcacctataacaaagttgaaaacatgacaccccgtgaccttggtgcttgtattgactgtagtgcgcgtcatattaatgcgcaggtagcaaaaagtcacaacattgctttgatatggaacgttaaagatttcatgtcattgtctgaacaactacgaaaacaaatacgtagtgctgctaaaaagaataacttaccttttaagttgacatgtgcaactactagacaagttgttaatgttgtaacaacaaagatagcacttaagggtggtaaaattgttaataattggttgaagcagttaattaaagttacacttgtgttcctttttgttgctgctattttctatttaataacacctgttcatgtcatgtctaaacatactgacttttcaagtgaaatcataggatacaaggctattgatggtggtgtcactcgtgacatagcatctacagatacttgttttgctaacaaacatgctgattttgacacatggtttagccagcgtggtggtagttatactaatgacaaagcttgcccattgattgctgcagtcataacaagagaagtgggttttgtcgtgcctggtttgcctggcacgatattacgcacaactaatggtgactttttgcatttcttacctagagtttttagtgcagttggtaacatctgttacacaccatcaaaacttatagagtacactgactttgcaacatcagcttgtgttttggctgctgaatgtacaatttttaaagatgcttctggtaagccagtaccatattgttatgataccaatgtactagaaggttctgttgcttatgaaagtttacgccctgacacacgttatgtgctcatggatggctctattattcaatttcctaacacctaccttgaaggttctgttagagtggtaacaacttttgattctgagtactgtaggcacggcacttgtgaaagatcagaagctggtgtttgtgtatctactagtggtagatgggtacttaacaatgattattacagatctttaccaggagttttctgtggtgtagatgctgtaaatttacttactaatatgtttacaccactaattcaacctattggtgctttggacatatcagcatctatagtagctggtggtattgtagctatcgtagtaacatgccttgcctactattttatgaggtttagaagagcttttggtgaatacagtcatgtagttgcctttaatactttactattccttatgtcattcactgtactctgtttaacaccagtttactcattcttacctggtgtttattctgttatttacttgtacttgacattttatcttactaatgatgtttcttttttagcacatattcagtggatggttatgttcacacctttagtacctttctggataacaattgcttatatcatttgtatttccacaaagcatttctattggttctttagtaattacctaaagagacgtgtagtctttaatggtgtttcctttagtacttttgaagaagctgcgctgtgcacctttttgttaaataaagaaatgtatctaaagttgcgtagtgatgtgctattacctcttacgcaatataatagatacttagctctttataataagtacaagtattttagtggagcaatggatacaactagctacagagaagctgcttgttgtcatctcgcaaaggctctcaatgacttcagtaactcaggttctgatgttctttaccaaccaccacaaacctctatcacctcagctgttttgcagagtggttttagaaaaatggcattcccatctggtaaagttgagggttgtatggtacaagtaacttgtggtacaactacacttaacggtctttggcttgatgacgtagtttactgtccaagacatgtgatctgcacctctgaagacatgcttaaccctaattatgaagatttactcattcgtaagtctaatcataatttcttggtacaggctggtaatgttcaactcagggttattggacattctatgcaaaattgtgtacttaagcttaaggttgatacagccaatcctaagacacctaagtataagtttgttcgcattcaaccaggacagactttttcagtgttagcttgttacaatggttcaccatctggtgtttaccaatgtgctatgaggcccaatttcactattaagggttcattccttaatggttcatgtggtagtgttggttttaacatagattatgactgtgtctctttttgttacatgcaccatatggaattaccaactggagttcatgctggcacagacttagaaggtaacttttatggaccttttgttgacaggcaaacagcacaagcagctggtacggacacaactattacagttaatgttttagcttggttgtacgctgctgttataaatggagacaggtggtttctcaatcgatttaccacaactcttaatgactttaaccttgtggctatgaagtacaattatgaacctctaacacaagaccatgttgacatactaggacctctttctgctcaaactggaattgccgttttagatatgtgtgcttcattaaaagaattactgcaaaatggtatgaatggacgtaccatattgggtagtgctttattagaagatgaatttacaccttttgatgttgttagacaatgctcaggtgttactttccaaagtgcagtgaaaagaacaatcaagggtacacaccactggttgttactcacaattttgacttcacttttagttttagtccagagtactcaatggtctttgttcttttttttntatgaaaatgcctttttaccttttgctatgggtattattgctatgtctgcttttgcaatgatgtttgtcaaacataagcatgcatttctctgtttgtttttgttaccttctcttgccactgtagcttattttaatatggtctatatgcctgctagttgggtgatgcgtattatgacatggttggatatggttgatactagtttgtctggttttaagctaaaagactgtgttatgtatgcatcagctgtagtgttactaatccttatgacagcaagaactgtgtatgatgatggtgctaggagagtgtggacacttatgaatgtcttgacactcgtttataaagtttattatggtaatgctttagatcaagccatttccatgtgggctcttataatctctgttacttctaactactcaggtgtagttacaactgtcatgtttttggccagaggtattgtttttatgtgtgttgagtattgccctattttcttcataactggtaatacacttcagtgtataatgctagtttattgtttcttaggctatttttgtacttgttactttggcctcttttgtttactcaaccgctactttagactgactcttggtgtttatgattacttagtttctacacaggagtttagatatatgaattcacagggactactcccacccaagaatagcatagatgccttcaaactcaacattaaattgttgggtgttggtggcaaaccttgtatcaaagtagccactgtacagtctaaaatgtcagatgtaaagtgcacatcagtagtcttactctcagttttgcaacaactcagagtagaatcatcatctaaattgtgggctcaatgtgtccagttacacaatgacattctcttagctaaagatactactgaagcctttgaaaaaatggtttcactactttctgttttgctttccatgcagggtgctgtagacataaacaagctttgtgaagaaatgctggacaacagggcaaccttacaagctatagcctcagagtttagttcccttccatcatatgcagcttttgctactgctcaagaagcttatgagcaggctgttgctaatggtgattctgaagttgttcttaaaaagttgaagaagtctttgaatgtggctaaatctgaatttgaccgtgatgcagccatgcaacgtaagttggaaaagatggctgatcaagctatgacccaaatgtataaacaggctagatctgaggacaagagggcaaaagttactagtgctatgcagacaatgcttttcactatgcttagaaagttggataatgatgcactcaacaacattatcaacaatgcaagagatggttgtgttcccttgaacataatacctcttacaacagcagccaaactaatggttgtcataccagactataacacatataaaaatacgtgtgatggtacaacatttacttatgcatcagcattgtgggaaatccaacaggttgtagatgcagatagtaaaattgttcaacttagtgaaattagtatggacaattcacctaatttagcatggcctcttattgtaacagctttaagggccaattctgctgtcaaattacagaataatgagcttagtcctgttgcactacgacagatgtcttgtgctgccggtactacacaaactgcttgcactgatgacaatgcgttagcttactacaacacaacaaagggaggtaggtttgtacttgcactgttatccgatttacaggatttgaaatgggctagattccctaagagtgatggaactggtactatctatacagaactggaaccaccttgtaggtttgttacagacacacctaaaggtcctaaagtgaagtatttatactttattaaaggattaaacaacctaaatagaggtatggtacttggtagtttagctgccacagtacgtctacaagctggtaatgcaacagaagtgcctgccaattcaactgtattatctttctgtgcttttgctgtagatgctgctaaagcttacaaagattatctagctagtgggggacaaccaatcactaattgtgttaagatgttgtgtacacacactggtactggtcaggcaataacagttacaccggaagccaatatggatcaagaatcctttggtggtgcatcgtgttgtctgtactgccgttgccacatagatcatccaaatcctaaaggattttgtgacttaaaaggtaagtatgtacaaatacctacaacttgtgctaatgaccctgtgggttttacacttaaaaacacagtctgtaccgtctgcggtatgtggaaaggttatggctgtagttgtgatcaactccgcgaacccatgcttcagtcagctgatgcacaatcgtttttaaacgggtttgcggtgtaagtgcagcccgtcttacaccgtgcggcacaggcactagtactgatgtcgtatacagggcttttgacatctacaatgataaagtagctggttttgctaaattcctaaaaactaattgttgtcgcttccaagaaaaggacgaagatgacaatttaattgattcttactttgtagttaagagacacactttctctaactaccaacatgaagaaacaatttataatttacttaaggattgtccagctgttgctaaacatgacttctttaagtttagaatagacggtgacatggtaccacatatatcacgtcaacgtcttactaaatacacaatggcagacctcgtctatgctttaaggcattttgatgaaggtaattgtgacacattaaaagaaatacttgtcacatacaattgttgtgatgatgattatttcaataaaaaggactggtatgattttgtagaaaacccagatatattacgcgtatacgccaacttaggtgaacgtgtacgccaagctttgttaaaaacagtacaattctgtgatgccatgcgaaatgctggtattgttggtgtactgacattagataatcaagatctcaatggtaactggtatgatttcggtgatttcatacaaaccacgccaggtagtggagttcctgttgtagattcttattattcattgttaatgcctatattaaccttgaccagggctttaactgcagagtcacatgttgacactgacttaacaaagccttacattaagtgggatttgttaaaatatgacttcacggaagagaggttaaaactctttgaccgttattttaaatattgggatcagacataccacccaaattgtgttaactgtttggatgacagatgcattctgcattgtgcaaactttaatgttttattctctacagtgttcccacctacaagttttggaccactagtgagaaaaatatttgttgatggtgttccatttgtagtttcaactggataccacttcagagagctaggtgttgtacataatcaggatgtaaacttacatagctctagacttagttttaaggaattacttgtgtatgctgctgaccctgctatgcacgctgcttctggtaatctattactagataaacgcactacgtgcttttcagtagctgcacttactaacaatgttgcttttcaaactgtcaaacccggtaattttaacaaagacttctatgactttgctgtgtctaagggtttctttaaggaaggaagttctgttgaattaaaacacttcttctttgctcaggatggtaatgctgctatcagcgattatgactactatcgttataatctaccaacaatgtgtgatatcagacaactactatttgtagttgaagttgttgataagtactttgattgttacgatggtggctgtattaatgctaaccaagtcatcgtcaacaacctagacaaatcagctggttttccatttaataaatggggtaaggctagactttattatgattcaatgagttatgaggatcaagatgcacttttcgcatatacaaaacgtaatgtcatccctactataactcaaatgaatcttaagtatgccattagtgcaaagaatagagctcgcaccgtagctggtgtctctatctgtagtactatgaccaatagacagtttcatcaaaaattattgaaatcaatagccgccactagaggagctactgtagtaattggaacaagcaaattctatggtggttggcacaacatgttaaaaactgtttatagtgatgtagaaaaccctcaccttatgggttgggattatcctaaatgtgatagagccatgcctaacatgcttagaattatggcctcacttgttcttgctcgcaaacatacaacgtgttgtagcttgtcacaccgtttctatagattagctaatgagtgtgctcaagtattgagtgaaatggtcatgtgtggcggttcactatatgttaaaccaggtggaacctcatcaggagatgccacaactgcttatgctaatagtgtttttaacatttgtcaagctgtcacggccaatgttaatgcacttttatctactgatggtaacaaaattgccgataagtatgtccgcaatttacaacacagactttatgagtgtctctatagaaatagagatgttgacacagactttgtgaatgagttttacgcatatttgcgtaaacatttctcaatgatgatactctctgacgatgctgttgtgtgtttcaatagcacttatgcatctcaaggtctagtggctagcataaagaactttaagtcagttctttattatcaaaacaatgtttttatgtctgaagcaaaatgttggactgagactgaccttactaaaggacctcatgaattttgctctcaacatacaatgctagttaaacagggtgatgattatgtgtaccttccttacccagatccatcaagaatcctaggggccggctgttttgtagatgatatcgtaaaaacagatggtacacttatgattgaacggttcgtgtctttagctatagatgcttacccacttactaaacatcctaatcaggagtatgctgatgtctttcatttgtacttacaatacataagaaagctacatgatgagttaacaggacacatgttagacatgtattctgttatgcttactaatgataacacttcaaggtattgggaacctgagttttatgaggctatgtacacaccgcatacagtcttacaggctgttggggcttgtgttctttgcaattcacagacttcattaagatgtggtgcttgcatacgtagaccattcttatgttgtaaatgctgttacgaccatgtcatatcaacatcacataaattagtcttgtctgttaatccgtatgtttgcaatgctccaggttgtgatgtcacagatgtgactcaactttacttaggaggtatgagctattattgtaaatcacataaaccacccattagttttccattgtgtgctaatggacaagtttttggtttatataaaaatacatgtgttggtagcgataatgttactgactttaatgcaattgcaacatgtgactggacaaatgctggtgattacattttagctaacacctgtactgaaagactcaagctttttgcagcagaaacgctcaaagctactgaggagacatttaaactgtcttatggtattgctactgtacgtgaagtgctgtctgacagagaattacatctttcatgggaagttggtaaacctagaccaccacttaaccgaaattatgtctttactggttatcgtgtaactaaaaacagtaaagtacaaataggagagtacacctttgaaaaaggtgactatggtgatgctgttgtttaccgaggtacaacaacttacaaattaaatgttggtgattattttgtgctgacatcacatacagtaatgccattaagtgcacctacactagtgccacaagagcactatgttagaattactggcttatacccaacactcaatatctcagatgagttttctagcaatgttgcaaattatcaaaaggttggtatgcaaaagtattctacactccagggaccacctggtactggtaagagtcattttgctattggcctagctctctactacccttctgctcgcatagtgtatacagcttgctctcatgccgctgttgatgcactatgtgagaaggcattaaaatatttgcctatagataaatgtagtagaattatacctgcacgtgctcgtgtagagtgttttgataaattcaaagtgaattcaacattagaacagtatgtcttttgtactgtaaatgcattgcctgagacgacagcagatatagttgtctttgatgaaatttcaatggccacaaattatgatttgagtgttgtcaatgccagattacgtgctaagcactatgtgtacattggcgaccctgctcaattacctgcaccacgcacattgctaactaagggcacactagaaccagaatatttcaattcagtgtgtagacttatgaaaactataggtccagacatgttcctcggaacttgtcggcgttgtcctgctgaaattgttgacactgtgagtgctttggtttatgataataagcttaaagcacataaagacaaatcagctcaatgctttaaaatgttttataagggtgttatcacgcatgatgtttcatctgcaattaacaggccacaaataggcgtggtaagagaattccttacacgtaaccctgcttggagaaaagctgtctttatttcaccttataattcacagaatgctgtagcctcaaagattttgggactaccaactcaaactgttgattcatcacagggctcagaatatgactatgtcatattcactcaaaccactgaaacagctcactcttgtaatgtaaacagatttaatgttgctattaccagagcaaaagtaggcatactttgcataatgtctgatagagacctttatgacaagttgcaatttacaagtcttgaaattccacgtaggaatgtggcaactttacaagctgaaaatgtaacaggactctttaaagattgtagtaaggtaatcactgggttacatcctacacaggcacctacacacctcagtgttgacactaaattcaaaactgaaggtttatgtgttgacatacctggcatacctaaggacatgacctatagaagactcatctctatgatgggttttaaaatgaattatcaagttaatggttaccctaacatgtttatcacccgcgaagaagctataagacatgtacgtgcatggattggcttcgatgtcgaggggtgtcatgctactagagaagctgttggtaccaatttacctttacagctaggtttttctacaggtgttaacctagttgctgtacctacaggttatgttgatacacctaataatacagatttttccagagttagtgctaaaccaccgcctggagatcaatttaaacacctcataccacttatgtacaaaggacttccttggaatgtagtgcgtataaagattgtacaaatgttaagtgacacacttaaaaatctctctgacagagtcgtatttgtcttatgggcacatggctttgagttgacatctatgaagtattttgtgaaaataggacctgagcgcacctgttgtctatgtgatagacgtgccacatgcttttccactgcttcagacacttatgcctgttggcatcattctattggatttgattacgtctataatccgtttatgattgatgttcaacaatggggttttacaggtaacctacaaagcaaccatgatctgtattgtcaagtccatggtaatgcacatgtagctagttgtgatgcaatcatgactaggtgtctagctgtccacgagtgctttgttaagcgtgttgactggactattgaatatcctataattggtgatgaactgaagattaatgcggcttgtagaaaggttcaacacatggttgttaaagctgcattattagcagacaaattcccagttcttcacgacattggtaaccctaaagctattaagtgtgtacctcaagctgatgtagaatggaagttctatgatgcacagccttgtagtgacaaagcttataaaatagaagaattattctattcttatgccacacattctgacaaattcacagatggtgtatgcctattttggaattgcaatgtcgatagatatcctgctaattccattgtttgtagatttgacactagagtgctatctaaccttaacttgcctggttgtgatggtggcagtttgtatgtaaataaacatgcattccacacaccagcttttgataaaagtgcttttgttaatttaaaacaattaccatttttctattactctgacagtccatgtgagtctcatggaaaacaagtagtgtcagatatagattatgtaccactaaagtctgctacgtgtataacacgttgcaatttaggtggtgctgtctgtagacatcatgctaatgagtacagattgtatctcgatgcttataacatgatgatctcagctggctttagcttgtgggtttacaaacaatttgatacttataacctctggaacacttttacaagacttcagagtttagaaaatgtggcttttaatgttgtaaataagggacactttgatggacaacagggtgaagtaccagtttctatcattaataacactgtttacacaaaagttgatggtgttgatgtagaattgtttgaaaataaaacaacattacctgttaatgtagcatttgagctttgggctaagcgcaacattaaaccagtaccagaggtgaaaatactcaataatttgggtgtggacattgctgctaatactgtgatctgggactacaaaagagatgctccagcacatatatctactattggtgtttgttctatgactgacatagccaagaaaccaactgaaacgatttgtgcaccactcactgtcttttttgatggtagagttgatggtcaagtagacttatttagaaatgcccgtaatggtgttcttattacagaaggtagtgttaaaggtttacaaccatctgtaggtcccaaacaagctagtcttaatggagtcacattaattggagaagccgtaaaaacacagttcaattattataagaaagttgatggtgttgtccaacaattacctgaaacttactttactcagagtagaaatttacaagaatttaaacccaggagtcaaatggaaattgatttcttagaattagctatggatgaattcattgaacggtataaattagaaggctatgccttcgaacatatcgtttatggagattttagtcatagtcagttaggtggtttacatctactgattggactagctaaacgttttaaggaatcaccttttgaattagaagattttattcctatggacagtacagttaaaaactatttcataacagatgcgcaaacaggttcatctaagtgtgtgtgttctgttattgatttattacttgatgattttgttgaaataataaaatcccaagatttatctgtagtttctaaggttgtcaaagtgactattgactatacagaaatttcatttatgctttggtgtaaagatggccatgtagaaacattttacccaaaattacaatctagtcaagcgtggcaaccgggtgttgctatgcctaatctttacaaaatgcaaagaatgctattagaaaagtgtgaccttcaaaattatggtgatagtgcaacattacctaaaggcataatgatgaatgtcgcaaaatatactcaactgtgtcaatatttaaacacattaacattagctgtaccctataatatgagagttatacattttggtgctggttctgataaaggagttgcaccaggtacagctgttttaagacagtggttgcctacgggtacgctgcttgtcgattcagatcttaatgactttgtctctgatgcagattcaactttgattggtgattgtgcaactgtacatacagctaataaatgggatctcattattagtgatatgtacgaccctaagactaaaaatgttacaaaagaaaatgactctaaagagggttttttcacttacatttgtgggtttatacaacaaaagctagctcttggaggttccgtggctataaagataacagaacattcttggaatgctgatctttataagctcatgggacacttcgcatggtggacagcctttgttactaatgtgaatgcgtcatcatctgaagcatttttaattggatgtaattatcttggcaaaccacgcgaacaaatagatggttatgtcatgcatgcaaattacatattttggaggaatacaaatccaattcagttgtcttcctattctttatttgacatgagtaaatttccccttaaattaaggggtactgctgttatgtctttaaaagaaggtcaaatcaatgatatgattttatctcttcttagtaaaggtagacttataattagagaaaacaacagagttgttatttctagtgatgttcttgttaacaactaaacgaacaatgtttgtttttcttgttttattgccactagtctctagtcagtgtgttaatcttacaaccagaactcaattaccccctgcatacactaattctttcacacgtggtgtttattaccctgacaaagttttcagatcctcagttttacattcaactcaggacttgttcttacctttcttttccaatgttacttggttccatgctatacatgtctctgggaccaatggtactaagaggtttgataaccctgtcctaccatttaatgatggtgtttattttgcttccactgagaagtctaacataataagaggctggatttttggtactactttagattcgaagacccagtccctacttattgttaataacgctactaatgttgttattaaagtctgtgaatttcaattttgtaatgatccatttttgggtgtttattaccacaaaaacaacaaaagttggatggaaagtgagttcagagtttattctagtgcgaataattgcacttttgaatatgtctctcagccttttcttatggaccttgaaggaaaacagggtaatttcaaaaatcttagggaatttgtgtttaagaatattgatggttattttaaaatatattctaagcacacgcctattaatttagtgcgtgatctccctcagggtttttcggctttagaaccattggtagatttgccaataggtattaacatcactaggtttcaaactttacttgctttacatagaagttatttgactcctggtgattcttcttcaggttggacagctggtgctgcagcttattatgtgggttatcttcaacctaggacttttctattaaaatataatgaaaatggaaccattacagatgctgtagactgtgcacttgaccctctctcagaaacaaagtgtacgttgaaatccttcactgtagaaaaaggaatctatcaaacttctaactttagagtccaaccaacagaatctattgttagatttcctaatattacaaacttgtgcccttttggtgaagtttttaacgccaccagatttgcatctgtttatgcttggaacaggaagagaatcagcaactgtgttgctgattattctgtcctatataattccgcatcattttccacttttaagtgttatggagtgtctcctactaaattaaatgatctctgctttactaatgtctatgcagattcatttgtaattagaggtgatgaagtcagacaaatcgctccagggcaaactggaaagattgctgattataattataaattaccagatgattttacaggctgcgttatagcttggaattctaacaatcttgattctaaggttggtggtaattataattacctgtatagattgtttaggaagtctaatctcaaaccttttgagagagatatttcaactgaaatctatcaggccggtagcacaccttgtaatggtgttgaaggttttaattgttactttcctttacaatcatatggtttccaacccactaatggtgttggttaccaaccatacagagtagtagtactttcttttgaacttctacatgcaccagcaactgtttgtggacctaaaaagtctactaatttggttaaaaacaaatgtgtcaatttcaacttcaatggtttaacaggcacaggtgttcttactgagtctaacaaaaagtttctgcctttccaacaatttggcagagacattgctgacactactgatgctgtccgtgatccacagacacttgagattcttgacattacaccatgttcttttggtggtgtcagtgttataacaccaggaacaaatacttctaaccaggttgctgttctttatcaggatgttaactgcacagaagtccctgttgctattcatgcagatcaacttactcctacttggcgtgtttattctacaggttctaatgtttttcaaacacgtgcaggctgtttaataggggctgaacatgtcaacaactcatatgagtgtgacatacccattggtgcaggtatatgcgctagttatcagactcagactaattctcctcggcgggcacgtagtgtagctagtcaatccatcattgcctacactatgtcacttggtgcagaaaattcagttgcttactctaataactctattgccatacccacaaattttactattagtgttaccacagaaattctaccagtgtctatgaccaagacatcagtagattgtacaatgtacatttgtggtgattcaactgaatgcagcaatcttttgttgcaatatggcagtttttgtacacaattaaaccgtgctttaactggaatagctgttgaacaagacaaaaacacccaagaagtttttgcacaagtcaaacaaatttacaaaacaccaccaattaaagattttggtggttttaatttttcacaaatattaccagatccatcaaaaccaagcaagaggtcatttattgaagatctacttttcaacaaagtgacacttgcagatgctggcttcatcaaacaatatggtgattgccttggtgatattgctgctagagacctcatttgtgcacaaaagtttaacggccttactgttttgccacctttgctcacagatgaaatgattgctcaatacacttctgcactgttagcgggtacaatcacttctggttggacctttggtgcaggtgctgcattacaaataccatttgctatgcaaatggcttataggtttaatggtattggagttacacagaatgttctctatgagaaccaaaaattgattgccaaccaatttaatagtgctattggcaaaattcaagactcactttcttccacagcaagtgcacttggaaaacttcaagatgtggtcaaccaaaatgcacaagctttaaacacgcttgttaaacaacttagctccaattttggtgcaatttcaagtgttttaaatgatatcctttcacgtcttgacaaagttgaggctgaagtgcaaattgataggttgatcacaggcagacttcaaagtttgcagacatatgtgactcaacaattaattagagctgcagaaatcagagcttctgctaatcttgctgctactaaaatgtcagagtgtgtacttggacaatcaaaaagagttgatttttgtggaaagggctatcatcttatgtccttccctcagtcagcacctcatggtgtagtcttcttgcatgtgacttatgtccctgcacaagaaaagaacttcacaactgctcctgccatttgtcatgatggaaaagcacactttcctcgtgaaggtgtctttgtttcaaatggcacacactggtttgtaacacaaaggaatttttatgaaccacaaatcattactacagacaacacatttgtgtctggtaactgtgatgttgtaataggaattgtcaacaacacagtttatgatcctttgcaacctgaattagactcattcaaggaggagttagataaatattttaagaatcatacatcaccagatgttgatttaggtgacatctctggcattaatgcttcagttgtaaacattcaaaaagaaattgaccgcctcaatgaggttgccaagaatttaaatgaatctctcatcgatctccaagaacttggaaagtatgagcagtatataaaatggccatggtacatttggctaggttttatagctggcttgattgccatagtaatggtgacaattatgctttgctgtatgaccagttgctgtagttgtctcaagggctgttgttcttgtggatcctgctgcaaatttgatgaagacgactctgagccagtgctcaaaggagtcaaattacattacacataaacgaacttatggatttgtttatgagaatcttcacaattggaactgtaactttgaagcaaggtgaaatcaaggatgctactccttcagattttgttcgcgctactgcaacgataccgatacaagcctcactccctttcggatggcttattgttggcgttgcacttcttgctgtttttcagagcgcttccaaaatcataaccctcaaaaagagatggcaactagcactctccaagggtgttcactttgtttgcaacttgctgttgttgtttgtaacagtttactcacaccttttgctcgttgctgctggccttgaagccccttttctctatctttatgctttagtctacttcttgcagagtataaactttgtaagaataataatgaggctttggctttgctggaaatgccgttccaaaaacccattactttatgatgccaactattttctttgctggcatactaattgttacgactattgtataccttacaatagtgtaacttcttcaattgtcattacttcaggtgatggcacaacaagtcctatttctgaacatgactaccagattggtggttatactgaaaaatgggaatctggagtaaaagactgtgttgtattacacagttacttcacttcagactattaccagctgtactcaactcaattgagtacagacactggtgttgaacatgttaccttcttcatctacaataaaattgttgatgagcctgaagaacatgtccaaattcacacaatcgacgtttcatccggagttgttaatccagtaatggaaccaatttatgatgaaccgacgacgactactagcgtgcctttgtaagcacaagctgatgagtacgaacttatgtactcattcgtttcggaagagacaggtacgttaatagttaatagcgtacttctttttcttgctttcgtggtattcttgctagttacactagccatccttactgcgcttcgattgtgtgcgtactgctgcaatattgttaacgtgagtcttgtaaaaccttctttttacgtttactctcgtgttaaaaatctgaattcttctagagttcctgatcttctggtctaaacgaactaaatattatattagtttttctgtttggaactttaattttagccatggcagattccaacggtactattaccgttgaagagcttaaaaagctccttgaacaatggaacctagtaataggtttcctattccttacatggatttgtcttctacaatttgcctatgccaacaggaataggtttttgtatataattaagttaattttcctctggctgttatggccagtaactttagcttgttttgtgcttgctgctgtttacagaataaattggatcaccggtggaattgctatcgcaatggcttgtcttgtaggcttgatgtggctcagctacttcattgcttctttcagactgtttgcgcgtacgcgttccatgtggtcattcaatccagaaactaacattcttctcaacgtgccactccatggcactattctgaccagaccgcttctagaaagtgaactcgtaatcggagctgtgatccttcgtggacatcttcgtattgctggacaccatctaggacgctgtgacatcaaggacctgcctaaagaaatcactgttgctacatcacgaacgctttcttattacaaattgggagcttcgcagcgtgtagcaggtgactcaggttttgctgcatacagtcgctacaggattggcaactataaattaaacacagaccattccagtagcagtgacaatattgctttgcttgtacagtaagtgacaacagatgtttcatctcgttgactttcaggttactatagcagagatattactaattattatgaggacttttaaagtttccatttggaatcttgattacatcataaacctcataattaaaaatttatctaagtcactaactgagaataaatattctcaattagatgaagagcaaccaatggagattgattaaacgaacatgaaaattattcttttcttggcactgataacactcgctacttgtgagctttatcactaccaagagtgtgttagaggtacaacagtacttttaaaagaaccttgctcttctggaacatacgagggcaattcaccatttcatcctctagctgataacaaatttgcactgacttgctttagcactcaatttgcttttgcttgtcctgacggcgtaaaacacgtctatcagttacgtgccagatcagtttcacctaaactgttcatcagacaagaggaagttcaagaactttactctccaatttttcttattgttgcggcaatagtgtttataacactttgcttcacactcaaaagaaagacagaatgattgaactttcattaattgacttctatttgtgctttttagcctttctgctattccttgttttaattatgcttattatcttttggttctcacttgaactgcaagatcataatgaaacttgtcacgcctaaacgaacatgaaatttcttgttttcttaggaatcatcacaactgtagctgcatttcaccaagaatgtagtttacagtcatgtactcaacatcaaccatatgtagttgatgacccgtgtcctattcacttctattctaaatggtatattagagtaggagctagaaaatcagcacctttaattgaattgtgcgtggatgaggctggttctaaatcacccattcagtacatcgatatcggtaattatacagtttcctgtttaccttttacaattaattgccaggaacctaaattgggtagtcttgtagtgcgttgttcgttctatgaagactttttagagtatcatgacgttcgtgttgttttagatttcatctaaacgaacaaactaaaatgtctgataatggaccccaaaatcagcgaaatgcaccccgcattacgtttggtggaccctcagattcaactggcagtaaccagaatggagaacgcagtggggcgcgatcaaaacaacgtcggccccaaggtttacccaataatactgcgtcttggttcaccgctctcactcaacatggcaaggaagaccttaaattccctcgaggacaaggcgttccaattaacaccaatagcagtccagatgaccaaattggctactaccgaagagctaccagacgaattcgtggtggtgacggtaaaatgaaagatctcagtccaagatggtatttctactacctaggaactgggccagaagctggacttccctatggtgctaacaaagacggcatcatatgggttgcaactgagggagccttgaatacaccaaaagatcacattggcacccgcaatcctgctaacaatgctgcaatcgtgctacaacttcctcaaggaacaacattgccaaaaggcttctacgcagaagggagcagaggcggcagtcaagcctcttctcgttcctcatcacgtagtcgcaacagttcaagaaattcaactccaggcagcagtaggggaacttctcctgctagaatggctggcaatggcggtgatgctgctcttgctttgctgctgcttgacagattgaaccagcttgagagcaaaatgtctggtaaaggccaacaacaacaaggccaaactgtcactaagaaatctgctgctgaggcttctaagaagcctcggcaaaaacgtactgccactaaagcatacaatgtaacacaagctttcggcagacgtggtccagaacaaacccaaggaaattttggggaccaggaactaatcagacaaggaactgattacaaacattggccgcaaattgcacaatttgcccccagcgcttcagcgttcttcggaatgtcgcgcattggcatggaagtcacaccttcgggaacgtggttgacctacacaggtgccatcaaattggatgacaaagatccaaatttcaaagatcaagtcattttgctgaataagcatattgacgcatacaaaacattcccaccaacagagcctaaaaaggacaaaaagaagaaggctgatgaaactcaagccttaccgcagagacagaagaaacagcaaactgtgactcttcttcctgctgcagatttggatgatttctccaaacaattgcaacaatccatgagcagtgctgactcaactcaggcctaaactcatgcagaccacacaaggcagatgggctatataaacgttttcgcttttccgtttacgatatatagtctactcttgtgcagaatgaattctcgtaactacatagcacaagtagatgtagttaactttaatctcacatagcaatctttaatcagtgtgtaacattagggaggacttgaaagagccaccacattttcaccgaggccacgcggagtacgatcgagtgtacagtgaacaatgctagggagagctgcctatatggaagagccctaatgtgtaaaattaattttagtagtgctatccccatgtgattttaatagcttcttaggagaat

SEQ ID NO: 10 - protein, 7062 aa, SARS-CoV2
  misc_feature (3606)..(3606): Xaa can be any naturally occurring amino acid
MESLVPGFNEKTHVQLSLPVLQVRDVLVRGFGDSVEEVLSEARQHLKDGTCGLVEVEKGVLPQLEQPYVFIKRSDARTAPHGHVMVELVAELEGIQYGRSGETLGVLVPHVGEIPVAYRKVLLRKNGNKGAGGHSYGADLKSFDLGDELGTDPYEDFQENWNTKHSSGVTRELMRELNGGAYTRYVDNNFCGPDGYPLECIKDLLARAGKASCTLSEQLDFIDTKRGVYCCREHEHEIAWYTERSEKSYELQTPFEIKLAKKFDTFNGECPNFVFPLNSIIKTIQPRVEKKKLDGFMGRIRSVYPVASPNECNQMCLSTLMKCDHCGETSWQTGDFVKATCEFCGTENLTKEGATTCGYLPQNAVVKIYCPACHNSEVGPEHSLAEYHNESGLKTILRKGGRTIAFGGCVFSYVGCHNKCAYWVPRASANIGCNHTGVVGEGSEGLNDNLLEILQKEKVNINIVGDFKLNEEIAIILASFSASTSAFVETVKGLDYKAFKQIVESCGNFKVTKGKAKKGAWNIGEQKSILSPLYAFASEAARVVRSIFSRTLETAQNSVRVLQKAAITILDGISQYSLRLIDAMMFTSDLATNNLVVMAYITGGVVQLTSQWLTNIFGTVYEKLKPVLDWLEEKFKEGVEFLRDGWEIVKFISTCACEIVGGQIVTCAKEIKESVQTFFKLVNKFLALCADSIIIGGAKLKALNLGETFVTHSKGLYRKCVKSREETGLLMPLKAPKEIIFLEGETLPTEVLTEEVVLKTGDLQPLEQPTSEAVEAPLVGTPVCINGLMLLEIKDTEKYCALAPNMMVTNNTFTLKGGAPTKVTFGDDTVIEVQGYKSVNITFELDERIDKVLNEKCSAYTVELGTEVNEFACVVADAVIKTLQPVSELLTPLGIDLDEWSMATYYLFDESGEFKLASHMYCSFYPPDEDEEEGDCEEEEFEPSTQYEYGTEDDYQGKPLEFGATSAALQPEEEQEEDWLDDDSQQTVGQQDGSEDNQTTTIQTIVEVQPQLEMELTPVVQTIEVNSFSGYLKLTDNVYIKNADIVEEAKKVKPTVVVNAANVYLKHGGGVAGALNKATNNAMQVESDDYIATNGPLKVGGSCVLSGHNLAKHCLHVVGPNVNKGEDIQLLKSAYENFNQHEVLLAPLLSAGIFGADPIHSLRVCVDTVRTNVYLAVFDKNLYDKLVSSFLEMKSEKQVEQKIAEIPKEEVKPFITESKPSVEQRKQDDKKIKACVEEVTTTLEETKFLTENLLLYIDINGNLHPDSATLVSDIDITFLKKDAPYIVGDVVQEGVLTAVVIPTKKAGGTTEMLAKALRKVPTDNYITTYPGQGLNGYTVEEAKTVLKKCKSAFYILPSIISNEKQEILGTVSWNLREMLAHAEETRKLMPVCVETKAIVSTIQRKYKGIKIQEGVVDYGARFYFYTSKTTVASLINTLNDLNETLVTMPLGYVTHGLNLEEAARYMRSLKVPATVSVSSPDAVTAYNGYLTSSSKTPEEHFIETISLAGSYKDWSYSGQSTQLGIEFLKRGDKSVYYTSNPTTFHLDGEVITFDNLKTLLSLREVRTIKVFTTVDNINLHTQVVDMSMTYGQQFGPTYLDGADVTKIKPHNSHEGKTFYVLPNDDTLRVEAFEYYHTTDPSFLGRYMSALNHTKKWKYPQVNGLTSIKWADNNCYLATALLTLQQIELKFNPPALQDAYYRARAGEAANFCALILAYCNKTVGELGDVRETMSYLFQHANLDSCKRVLNVVCKTCGQQQTTLKGVEAVMYMGTLSYEQFKKGVQIPCTCGKQATKYLVQQESPFVMMSAPPAQYELKHGTFTCASEYTGNYQCGHYKHITSKETLYCIDGALLTKSSEYKGPITDVFYKENSYTTTIKPVTYKLDGVVCTEIDPKLDNYYKKDNSYFTEQPIDLVPNQPYPNASFDNFKFVCDNIKFADDLNQLTGYKKPASRELKVTFFPDLNGDVVAIDYKHYTPSFKKGAKLLHKPIVWHVNNATNKATYKPNTWCIRCLWSTKPVETSNSFDVLKSEDAQGMDNLACEDLKPVSEEVVENPTIQKDVLECNVKTTEVVGDIILKPANNSLKITEEVGHTDLMAAYVDNSSLTIKKPNELSRVLGLKTLATHGLAAVNSVPWDTIANYAKPFLNKVVSTTTNIVTRCLNRVCTNYMPYFFTLLLQLCTFTRSTNSRIKASMPTTIAKNTVKSVGKFCLEASFNYLKSPNFSKLINIIIWFLLLSVCLGSLIYSTAALGVLMSNLGMPSYCTGYREGYLNSTNVTIATYCTGSIPCSVCLSGLDSLDTYPSLETIQITISSFKWDLTAFGLVAEWFLAYILFTRFFYVLGLAAIMQLFFSYFAVHFISNSWLMWLIINLVQMAPISAMVRMYIFFASFYYVWKSYVHVVDGCNSSTCMMCYKRNRATRVECTTIVNGVRRSFYVYANGGKGFCKLHNWNCVNCDTFCAGSTFISDEVARDLSLQFKRPINPTDQSSYIVDSVTVKNGSIHLYFDKAGQKTYERHSLSHFVNLDNLRANNTKGSLPINVIVFDGKSKCEESSAKSASVYYSQLMCQPILLLDQALVSDVGDSAEVAVKMFDAYVNTFSSTFNVPMEKLKTLVATAEAELAKNVSLDNVLSTFISAARQGFVDSDVETKDVVECLKLSHQSDIEVTGDSCNNYMLTYNKVENMTPRDLGACIDCSARHINAQVAKSHNIALIWNVKDFMSLSEQLRKQIRSAAKKNNLPFKLTCATTRQVVNVVTTKIALKGGKIVNNWLKQLIKVTLVFLFVAAIFYLITPVHVMSKHTDFSSEIIGYKAIDGGVTRDIASTDTCFANKHADFDTWFSQRGGSYTNDKACPLIAAVITREVGFVVPGLPGTILRTTNGDFLHFLPRVFSAVGNICYTPSKLIEYTDFATSACVLAAECTIFKDASGKPVPYCYDTNVLEGSVAYESLRPDTRYVLMDGSIIQFPNTYLEGSVRVVTTFDSEYCRHGTCERSEAGVCVSTSGRWVLNNDYYRSLPGVFCGVDAVNLLTNMFTPLIQPIGALDISASIVAGGIVAIVVTCLAYYFMRFRRAFGEYSHVVAFNTLLFLMSFTVLCLTPVYSFLPGVYSVIYLYLTFYLTNDVSFLAHIQWMVMFTPLVPFWITIAYIICISTKHFYWFFSNYLKRRVVFNGVSFSTFEEAALCTFLLNKEMYLKLRSDVLLPLTQYNRYLALYNKYKYFSGAMDTTSYREAACCHLAKALNDFSNSGSDVLYQPPQTSITSAVLQSGFRKMAFPSGKVEGCMVQVTCGTTTLNGLWLDDVVYCPRHVICTSEDMLNPNYEDLLIRKSNHNFLVQAGNVQLRVIGHSMQNCVLKLKVDTANPKTPKYKFVRIQPGQTFSVLACYNGSPSGVYQCAMRPNFTIKGSFLNGSCGSVGFNIDYDCVSFCYMHHMELPTGVHAGTDLEGNFYGPFVDRQTAQAAGTDTTITVNVLAWLYAAVINGDRWFLNRFTTTLNDFNLVAMKYNYEPLTQDHVDILGPLSAQTGIAVLDMCASLKELLQNGMNGRTILGSALLEDEFTPFDVVRQCSGVTFQSAVKRTIKGTHHWLLLTILTSLLVLVQSTQWSLFFFXYENAFLPFAMGIIAMSAFAMMFVKHKHAFLCLFLLPSLATVAYFNMVYMPASWVMRIMTWLDMVDTSLSGFKLKDCVMYASAVVLLILMTARTVYDDGARRVWTLMNVLTLVYKVYYGNALDQAISMWALIISVTSNYSGVVTTVMFLARGIVFMCVEYCPIFFITGNTLQCIMLVYCFLGYFCTCYFGLFCLLNRYFRLTLGVYDYLVSTQEFRYMNSQGLLPPKNSIDAFKLNIKLLGVGGKPCIKVATVQSKMSDVKCTSVVLLSVLQQLRVESSSKLWAQCVQLHNDILLAKDTTEAFEKMVSLLSVLLSMQGAVDINKLCEEMLDNRATLQAIASEFSSLPSYAAFATAQEAYEQAVANGDSEVVLKKLKKSLNVAKSEFDRDAAMQRKLEKMADQAMTQMYKQARSEDKRAKVTSAMQTMLFTMLRKLDNDALNNIINNARDGCVPLNIIPLTTAAKLMVVIPDYNTYKNTCDGTTFTYASALWEIQQVVDADSKIVQLSEISMDNSPNLAWPLIVTALRANSAVKLQNNELSPVALRQMSCAAGTTQTACTDDNALAYYNTTKGGRFVLALLSDLQDLKWARFPKSDGTGTIYTELEPPCRFVTDTPKGPKVKYLYFIKGLNNLNRGMVLGSLAATVRLQAGNATEVPANSTVLSFCAFAVDAAKAYKDYLASGGQPITNCVKMLCTHTGTGQAITVTPEANMDQESFGGASCCLYCRCHIDHPNPKGFCDLKGKYVQIPTTCANDPVGFTLKNTVCTVCGMWKGYGCSCDQLREPMLQSADAQSFLNRVCGVSAARLTPCGTGTSTDVVYRAFDIYNDKVAGFAKFLKTNCCRFQEKDEDDNLIDSYFVVKRHTFSNYQHEETIYNLLKDCPAVAKHDFFKFRIDGDMVPHISRQRLTKYTMADLVYALRHFDEGNCDTLKEILVTYNCCDDDYFNKKDWYDFVENPDILRVYANLGERVRQALLKTVQFCDAMRNAGIVGVLTLDNQDLNGNWYDFGDFIQTTPGSGVPVVDSYYSLLMPILTLTRALTAESHVDTDLTKPYIKWDLLKYDFTEERLKLFDRYFKYWDQTYHPNCVNCLDDRCILHCANFNVLFSTVFPPTSFGPLVRKIFVDGVPFVVSTGYHFRELGVVHNQDVNLHSSRLSFKELLVYAADPAMHAASGNLLLDKRTTCFSVAALTNNVAFQTVKPGNFNKDFYDFAVSKGFFKEGSSVELKHFFFAQDGNAAISDYDYYRYNLPTMCDIRQLLFVVEVVDKYFDCYDGGCINANQVIVNNLDKSAGFPFNKWGKARLYYDSMSYEDQDALFAYTKRNVIPTITQMNLKYAISAKNRARTVAGVSICSTMTNRQFHQKLLKSIAATRGATVVIGTSKFYGGWHNMLKTVYSDVENPHLMGWDYPKCDRAMPNMLRIMASLVLARKHTTCCSLSHRFYRLANECAQVLSEMVMCGGSLYVKPGGTSSGDATTAYANSVFNICQAVTANVNALLSTDGNKIADKYVRNLQHRLYECLYRNRDVDTDFVNEFYAYLRKHFSMMILSDDAVVCFNSTYASQGLVASIKNFKSVLYYQNNVFMSEAKCWTETDLTKGPHEFCSQHTMLVKQGDDYVYLPYPDPSRILGAGCFVDDIVKTDGTLMIERFVSLAIDAYPLTKHPNQEYADVFHLYLQYIRKLHDELTGHMLDMYSVMLTNDNTSRYWEPEFYEAMYTPHTVLQAVGACVLCNSQTSLRCGACIRRPFLCCKCCYDHVISTSHKLVLSVNPYVCNAPGCDVTDVTQLYLGGMSYYCKSHKPPISFPLCANGQVFGLYKNTCVGSDNVTDFNAIATCDWTNAGDYILANTCTERLKLFAAETLKATEETFKLSYGIATVREVLSDRELHLSWEVGKPRPPLNRNYVFTGYRVTKNSKVQIGEYTFEKGDYGDAVVYRGTTTYKLNVGDYFVLTSHTVMPLSAPTLVPQEHYVRITGLYPTLNISDEFSSNVANYQKVGMQKYSTLQGPPGTGKSHFAIGLALYYPSARIVYTACSHAAVDALCEKALKYLPIDKCSRIIPARARVECFDKFKVNSTLEQYVFCTVNALPETTADIVVFDEISMATNYDLSVVNARLRAKHYVYIGDPAQLPAPRTLLTKGTLEPEYFNSVCRLMKTIGPDMFLGTCRRCPAEIVDTVSALVYDNKLKAHKDKSAQCFKMFYKGVITHDVSSAINRPQIGVVREFLTRNPAWRKAVFISPYNSQNAVASKILGLPTQTVDSSQGSEYDYVIFTQTTETAHSCNVNRFNVAITRAKVGILCIMSDRDLYDKLQFTSLEIPRRNVATLQAENVTGLFKDCSKVITGLHPTQAPTHLSVDTKFKTEGLCVDIPGIPKDMTYRRLISMMGFKMNYQVNGYPNMFITREEAIRHVRAWIGFDVEGCHATREAVGTNLPLQLGFSTGVNLVAVPTGYVDTPNNTDFSRVSAKPPPGDQFKHLIPLMYKGLPWNVVRIKIVQMLSDTLKNLSDRVVFVLWAHGFELTSMKYFVKIGPERTCCLCDRRATCFSTASDTYACWHHSIGFDYVYNPFMIDVQQWGFTGNLQSNHDLYCQVHGNAHVASCDAIMTRCLAVHECFVKRVDWTIEYPIIGDELKINAACRKVQHMVVKAALLADKFPVLHDIGNPKAIKCVPQADVEWKFYDAQPCSDKAYKIEELFYSYATHSDKFTDGVCLFWNCNVDRYPANSIVCRFDTRVLSNLNLPGCDGGSLYVNKHAFHTPAFDKSAFVNLKQLPFFYYSDSPCESHGKQVVSDIDYVPLKSATCITRCNLGGAVCRHHANEYRLYLDAYNMMISAGFSLWVYKQFDTYNLWNTFTRLQSLENVAFNVVNKGHFDGQQGEVPVSIINNTVYTKVDGVDVELFENKTTLPVNVAFELWAKRNIKPVPEVKILNNLGVDIAANTVIWDYKRDAPAHISTIGVCSMTDIAKKPTETICAPLTVFFDGRVDGQVDLFRNARNGVLITEGSVKGLQPSVGPKQASLNGVTLIGEAVKTQFNYYKKVDGVVQQLPETYFTQSRNLQEFKPRSQMEIDFLELAMDEFIERYKLEGYAFEHIVYGDFSHSQLGGLHLLIGLAKRFKESPFELEDFIPMDSTVKNYFITDAQTGSSKCVCSVIDLLLDDFVEIIKSQDLSVVSKVVKVTIDYTEISFMLWCKDGHVETFYPKLQSSQAWQPGVAMPNLYKMQRMLLEKCDLQNYGDSATLPKGIMMNVAKYTQLCQYLNTLTLAVPYNMRVIHFGAGSDKGVAPGTAVLRQWLPTGTLLVDSDLNDFVSDADSTLIGDCATVHTANKWDLIISDMYDPKTKNVTKENDSKEGFFTYICGFIQQKLALGGSVAIKITEHSWNADLYKLMGHFAWWTAFVTNVNASSSEAFLIGCNYLGKPREQIDGYVMHANYIFWRNTNPIQLSSYSLFDMSKFPLKLRGTAVMSLKE

SEQ ID NO: 11 - protein, 1273 aa, SARS-CoV2; identical to SEQ ID NO: 3

SEQ ID NO: 12 - DNA, 29874 bp, SARS-CoV2
attaaaggtttataccttcccaggtaacaaaccaaccaactttcgatctcttgtagatctgttctctaaacgaactttaaaatctgtgtggctgtcactcggctgcatgcttagtgcactcacgcagtataattaataactaattactgtcgttgacaggacacgagtaactcgtctatcttctgcaggctgcttacggtttcgtccgtgttgcagccgatcatcagcacatctaggtttcgtccgggtgtgaccgaaaggtaagatggagagccttgtccctggtttcaacgagaaaacacacgtccaactcagtttgcctgttttacaggttcgcgacgtgctcgtacgtggctttggagactccgtggaggaggtcttatcagaggcacgtcaacatcttaaagatggcacttgtggcttagtagaagttgaaaaaggcgttttgcctcaacttgaacagccctatgtgttcatcaaacgttcggatgctcgaactgcacctcatggtcatgttatggttgagctggtagcagaactcgaaggcattcagtacggtcgtagtggtgagacacttggtgtccttgtccctcatgtgggcgaaataccagtggcttaccgcaaggttcttcttcgtaagaacggtaataaaggagctggtggccatagttacggcgccgatctaaagtcatttgacttaggcgacgagcttggcactgatccttatgaagattttcaagaaaactggaacactaaacatagcagtggtgttacccgtgaactcatgcgtgagcttaacggaggggcatacactcgctatgtcgataacaacttctgtggccctgatggctaccctcttgagtgcattaaagaccttctagcacgtgctggtaaagcttcatgcactttgtccgaacaactggactttattgacactaagaggggtgtatactgctgccgtgaacatgagcatgaaattgcttggtacacggaacgttctgaaaagagctatgaattgcagacaccttttgaaattaaattggcaaagaaatttgacaccttcaatggggaatgtccaaattttgtatttcccttaaattccataatcaagactattcaaccaagggttgaaaagaaaaagcttgatggctttatgggtagaattcgatctgtctatccagttgcgtcaccaaatgaatgcaaccaaatgtgcctttcaactctcatgaagtgtgatcattgtggtgaaacttcatggcagacgggcgattttgttaaagccacttgcgaattttgtggcactgagaatttgactaaagaaggtgccactacttgtggttacttaccccaaaatgctgttgttaaaatttattgtccagcatgtcacaattcagaagtaggacctgagcatagtcttgccgaataccataatgaatctggcttgaaaaccattcttcgtaagggtggtcgcactattgcctttggaggctgtgtgttctcttatgttggttgccataacaagtgtgcctattgggttccacgtgctagcgctaacataggttgtaaccatacaggtgttgttggagaaggttccgaaggtcttaatgacaaccttcttgaaatactccaaaaagagaaagtcaacatcaatattgttggtgactttaaacttaatgaagagatcgccattattttggcatctttttctgcttccacaagtgcttttgtggaaactgtgaaaggtttggattataaagcattcaaacaaattgttgaatcctgtggtaattttaaagttacaaaaggaaaagctaaaaaaggtgcctggaatattggtgaacagaaatcaatactgagtcctctttatgcatttgcatcagaggctgctcgtgttgtacgatcaattttctcccgcactcttgaaactgctcaaaattctgtgcgtgttttacagaaggccgctataacaatactagatggaatttcacagtattcactgagactcattgatgctatgatgttcacatctgatttggctactaacaatctagttgtaatggcctacattacaggtggtgttgttcagttgacttcgcagtggctaactaacatctttggcactgtttatgaaaaactcaaacccgtccttgattggcttgaagagaagtttaaggaaggtgtagagtttcttagagacggttgggaaattgttaaatttatctcaacctgtgcttgtgaaattgtcggtggacaaattgtcacctgtgcaaaggaaattaaggagagtgttcagacattctttaagcttgtaaataaatttttggctttgtgtgctgactctatcattattggtggagctaaacttaaagccttgaatttaggtgaaacatttgtcacgcactcaaagggattgtacagaaagtgtgttaaatccagagaagaaactggcctactcatgcctctaaaagccccaaaagaaattatcttcttagagggagaaacacttcccacagaagtgttaacagaggaagttgtcttgaaaactggtgatttacaaccattagaacaacctactagtgaagctgttgaagctccattggttggtacaccagtttgtattaacgggcttatgttgctcgaaatcaaagacacagaaaagtactgtgcccttgcacctaatatgatggtaacaaacaataccttcacactcaaaggcggtgcaccaacaaaggttacttttggtgatgacactgtgatagaagtgcaaggttacaagagtgtgaatatcacttttgaacttgatgaaaggattgataaagtacttaatgagaagtgctctgcctatacagttgaactcggtacagaagtaaatgagttcgcctgtgttgtggcagatgctgtcataaaaactttgcaaccagtatctgaattacttacaccactgggcattgatttagatgagtggagtatggctacatactacttatttgatgagtctggtgagtttaaattggcttcacatatgtattgttctttctaccctccagatgaggatgaagaagaaggtgattgtgaagaagaagagtttgagccatcaactcaatatgagtatggtactgaagatgattaccaaggtaaacctttggaatttggtgccacttctgctgctcttcaacctgaagaagagcaagaagaagattggttagatgatgatagtcaacaaactgttggtcaacaagacggcagtgaggacaatcagacaactactattcaaacaattgttgaggttcaacctcaattagagatggaacttacaccagttgttcagactattgaagtgaatagttttagtggttatttaaaacttactgacaatgtatacattaaaaatgcagacattgtggaagaagctaaaaaggtaaaaccaacagtggttgttaatgcagccaatgtttaccttaaacatggaggaggtgttgcaggagccttaaataaggctactaacaatgccatgcaagttgaatctgatgattacatagctactaatggaccacttaaagtgggtggtagttgtgttttaagcggacacaatcttgctaaacactgtcttcatgttgtcggcccaaatgttaacaaaggtgaagacattcaacttcttaagagtgcttatgaaaattttaatcagcacgaagttctacttgcaccattattatcagctggtatttttggtgctgaccctatacattctttaagagtttgtgtagatactgttcgcacaaatgtctacttagctgtctttgataaaaatctctatgacaaacttgtttcaagctttttggaaatgaagagtgaaaagcaagttgaacaaaagatcgctgagattcctaaagaggaagttaagccatttataactgaaagtaaaccttcagttgaacagagaaaacaagatgataagaaaatcaaagcttgtgttgaagaagttacaacaactctggaagaaactaagttcctcacagaaaacttgttactttatattgacattaatggcaatcttcatccagattctgccactcttgttagtgacattgacatcactttcttaaagaaagatgctccatatatagtgggtgatgttgttcaagagggtgttttaactgctgtggttatacctactaaaaaggctggtggcactactgaaatgctagcgaaagctttgagaaaagtgccaacagacaattatataaccacttacccgggtcagggtttaaatggttacactgtagaggaggcaaagacagtgcttaaaaagtgtaaaagtgccttttacattctaccatctattatctctaatgagaagcaagaaattcttggaactgtttcttggaatttgcgagaaatgcttgcacatgcagaagaaacacgcaaattaatgcctgtctgtgtggaaactaaagccatagtttcaactatacagcgtaaatataagggtattaaaatacaagagggtgtggttgattatggtgctagattttacttttacaccagtaaaacaactgtagcgtcacttatcaacacacttaacgatctaaatgaaactcttgttacaatgccacttggctatgtaacacatggcttaaatttggaagaagctgctcggtatatgagatctctcaaagtgccagctacagtttctgtttcttcacctgatgctgttacagcgtataatggttatcttacttcttcttctaaaacacctgaagaacattttattgaaaccatctcacttgctggttcctataaagattggtcctattctggacaatctacacaactaggtatagaatttcttaagagaggtgataaaagtgtatattacactagtaatcctaccacattccacctagatggtgaagttatcacctttgacaatcttaagacacttctttctttgagagaagtgaggactattaaggtgtttacaacagtagacaacattaacctccacacgcaagttgtggacatgtcaatgacatatggacaacagtttggtccaacttatttggatggagctgatgttactaaaataaaacctcataattcacatgaaggtaaaacattttatgttttacctaatgatgacactctacgtgttgaggcttttgagtactaccacacaactgatcctagttttctgggtaggtacatgtcagcattaaatcacactaaaaagtggaaatacccacaagttaatggtttaacttctattaaatgggcagataacaactgttatcttgccactgcattgttaacactccaacaaatagagttgaagtttaatccacctgctctacaagatgcttattacagagcaagggctggtgaagctgctaacttttgtgcacttatcttagcctactgtaataagacagtaggtgagttaggtgatgttagagaaacaatgagttacttgtttcaacatgccaatttagattcttgcaaaagagtcttgaacgtggtgtgtaaaacttgtggacaacagcagacaacccttaagggtgtagaagctgttatgtacatgggcacactttcttatgaacaatttaagaaaggtgttcagataccttgtacgtgtggtaaacaagctacaaaatatctagtacaacaggagtcaccttttgttatgatgtcagcaccacctgctcagtatgaacttaagcatggtacatttacttgtgctagtgagtacactggtaattaccagtgtggtcactataaacatataacttctaaagaaactttgtattgcatagacggtgctttacttacaaagtcctcagaatacaaaggtcctattacggatgttttctacaaagaaaacagttacacaacaaccataaaaccagttacttataaattggatggtgttgtttgtacagaaattgaccctaagttggacaattattataagaaagacaattcttatttcacagagcaaccaattgatcttgtaccaaaccaaccatatccaaacgcaagcttcgataattttaagtttgtatgtgataatatcaaatttgctgatgatttaaaccagttaactggttataagaaacctgcttcaagagagcttaaagttacatttttccctgacttaaatggtgatgtggtggctattgattataaacactacacaccctcttttaagaaaggagctaaattgttacataaacctattgtttggcatgttaacaatgcaactaataaagccacgtataaaccaaatacctggtgtatacgttgtctttggagcacaaaaccagttgaaacatcaaattcgtttgatgtactgaagtcagaggacgcgcagggaatggataatcttgcctgcgaagatctaaaaccagtctctgaagaagtagtggaaaatcctaccatacagaaagacgttcttgagtgtaatgtgaaaactaccgaagttgtaggagacattatacttaaaccagcaaataatagtttaaaaattacagaagaggttggccacacagatctaatggctgcttatgtagacaattctagtcttactattaagaaacctaatgaattatctagagtattaggtttgaaaacccttgctactcatggtttagctgctgttaatagtgtcccttgggatactatagctaattatgctaagccttttcttaacaaagttgttagtacaactactaacatagttacacggtgtttaaaccgtgtttgtactaattatatgccttatttctttactttattgctacaattgtgtacttttactagaagtacaaattctagaattaaagcatctatgccgactactatagcaaagaatactgttaagagtgtcggtaaattttgtctagaggcttcatttaattatttgaagtcacctaatttttctaaactgataaatattataatttggtttttactattaagtgtttgcctaggttctttaatctactcaaccgctgctttaggtgttttaatgtctaatttaggcatgccttcttactgtactggttacagagaaggctatttgaactctactaatgtcactattgcaacctactgtactggttctataccttgtagtgtttgtcttagtggtttagattctttagacacctatccttctttagaaactatacaaattaccatttcatcttttaaatgggatttaactgcttttggcttagttgcagagtggtttttggcatatattcttttcactaggtttttctatgtacttggattggctgcaatcatgcaattgtttttcagctattttgcagtacattttattagtaattcttggcttatgtggttaataattaatcttgtacaaatggccccgatttcagctatggttagaatgtacatcttctttgcatcattttattatgtatggaaaagttatgtgcatgttgtagacggttgtaattcatcaacttgtatgatgtgttacaaacgtaatagagcaacaagagtcgaatgtacaactattgttaatggtgttagaaggtccttttatgtctatgctaatggaggtaaaggcttttgcaaactacacaattggaattgtgttaattgtgatacattctgtgctggtagtacatttattagtgatgaagttgcgagagacttgtcactacagtttaaaagaccaataaatcctactgaccagtcttcttacatcgttgatagtgttacagtgaagaatggttccatccatctttactttgataaagctggtcaaaagacttatgaaagacattctctctctcattttgttaacttagacaacctgagagctaataacactaaaggttcattgcctattaatgttatagtttttgatggtaaatcaaaatgtgaagaatcatctgcaaaatcagcgtctgtttactacagtcagcttatgtgtcaacctatactgttactagatcaggcattagtgtctgatgttggtgatagtgcggaagttgcagttaaaatgtttgatgcttacgttaatacgttttcatcaacttttaacgtaccaatggaaaaactcaaaacactagttgcaactgcagaagctgaacttgcaaagaatgtgtccttagacaatgtcttatctacttttatttcagcagctcggcaagggtttgttgattcagatgtagaaactaaagatgttgttgaatgtcttaaattgtcacatcaatctgacatagaagttactggcgatagttgtaataactatatgctcacctataacaaagttgaaaacatgacaccccgtgaccttggtgcttgtattgactgtagtgcgcgtcatattaatgcgcaggtagcaaaaagtcacaacattgctttgatatggaacgttaaagatttcatgtcattgtctgaacaactacgaaaacaaatacgtagtgctgctaaaaagaataacttaccttttaagttgacatgtgcaactactagacaagttgttaatgttgtaacaacaaagatagcacttaagggtggtaaaattgttaataattggttgaagcagttaattaaagttacacttgtgttcctttttgttgctgctattttctatttaataacacctgttcatgtcatgtctaaacatactgacttttcaagtgaaatcataggatacaaggctattgatggtggtgtcactcgtgacatagcatctacagatacttgttttgctaacaaacatgctgattttgacacatggtttagccagcgtggtggtagttatactaatgacaaagcttgcccattgattgctgcagtcataacaagagaagtgggttttgtcgtgcctggtttgcctggcacgatattacgcacaactaatggtgactttttgcatttcttacctagagtttttagtgcagttggtaacatctgttacacaccatcaaaacttatagagtacactgactttgcaacatcagcttgtgttttggctgctgaatgtacaatttttaaagatgcttctggtaagccagtaccatattgttatgataccaatgtactagaaggttctgttgcttatgaaagtttacgccctgacacacgttatgtgctcatggatggctctattattcaatttcctaacacctaccttgaaggttctgttagagtggtaacaacttttgattctgagtactgtaggcacggcacttgtgaaagatcagaagctggtgtttgtgtatctactagtggtagatgggtacttaacaatgattattacagatctttaccaggagttttctgtggtgtagatgctgtaaatttacttactaatatgtttacaccactaattcaacctattggtgctttggacatatcagcatctatagtagctggtggtattgtagctatcgtagtaacatgccttgcctactattttatgaggtttagaagagcttttggtgaatacagtcatgtagttgcctttaatactttactattccttatgtcattcactgtactctgtttaacaccagtttactcattcttacctggtgtttattctgttatttacttgtacttgacattttatcttactaatgatgtttcttttttagcacatattcagtggatggttatgttcacacctttagtacctttctggataacaattgcttatatcatttgtatttccacaaagcatttctattggttctttagtaattacctaaagagacgtgtagtctttaatggtgtttcctttagtacttttgaagaagctgcgctgtgcacctttttgttaaataaagaaatgtatctaaagttgcgtagtgatgtgctattacctcttacgcaatataatagatacttagctctttataataagtacaagtattttagtggagcaatggatacaactagctacagagaagctgcttgttgtcatctcgcaaaggctctcaatgacttcagtaactcaggttctgatgttctttaccaaccaccacaaacctctatcacctcagctgttttgcagagtggttttagaaaaatggcattcccatctggtaaagttgagggttgtatggtacaagtaacttgtggtacaactacacttaacggtctttggcttgatgacgtagtttactgtccaagacatgtgatctgcacctctgaagacatgcttaaccctaattatgaagatttactcattcgtaagtctaatcataatttcttggtacaggctggtaatgttcaactcagggttattggacattctatgcaaaattgtgtacttaagcttaaggttgatacagccaatcctaagacacctaagtataagtttgttcgcattcaaccaggacagactttttcagtgttagcttgttacaatggttcaccatctggtgtttaccaatgtgctatgaggcccaatttcactattaagggttcattccttaatggttcatgtggtagtgttggttttaacatagattatgactgtgtctctttttgttacatgcaccatatggaattaccaactggagttcatgctggcacagacttagaaggtaacttttatggaccttttgttgacaggcaaacagcacaagcagctggtacggacacaactattacagttaatgttttagcttggttgtacgctgctgttataaatggagacaggtggtttctcaatcgatttaccacaactcttaatgactttaaccttgtggctatgaagtacaattatgaacctctaacacaagaccatgttgacatactaggacctctttctgctcaaactggaattgccgttttagatatgtgtgcttcattaaaagaattactgcaaaatggtatgaatggacgtaccatattgggtagtgctttattagaagatgaatttacaccttttgatgttgttagacaatgctcaggtgttactttccaaagtgcagtgaaaagaacaatcaagggtacacaccactggttgttactcacaattttgacttcacttttagttttagtccagagtactcaatggtctttgttcttttttttgtatgaaaatgcctttttaccttttgctatgggtattattgctatgtctgcttttgcaatgatgtttgtcaaacataagcatgcatttctctgtttgtttttgttaccttctcttgccactgtagcttattttaatatggtctatatgcctgctagttgggtgatgcgtattatgacatggttggatatggttgatactagtttgtctggttttaagctaaaagactgtgttatgtatgcatcagctgtagtgttactaatccttatgacagcaagaactgtgtatgatgatggtgctaggagagtgtggacacttatgaatgtcttgacactcgtttataaagtttattatggtaatgctttagatcaagccatttccatgtgggctcttataatctctgttacttctaactactcaggtgtagttacaactgtcatgtttttggccagaggtattgtttttatgtgtgttgagtattgccctattttcttcataactggtaatacacttcagtgtataatgctagtttattgtttcttaggctatttttgtacttgttactttggcctcttttgtttactcaaccgctactttagactgactcttggtgtttatgattacttagtttctacacaggagtttagatatatgaattcacagggactactcccacccaagaatagcatagatgccttcaaactcaacattaaattgttgggtgttggtggcaaaccttgtatcaaagtagccactgtacagtctaaaatgtcagatgtaaagtgcacatcagtagtcttactctcagttttgcaacaactcagagtagaatcatcatctaaattgtgggctcaatgtgtccagttacacaatgacattctcttagctaaagatactactgaagcctttgaaaaaatggtttcactactttctgttttgctttccatgcagggtgctgtagacataaacaagctttgtgaagaaatgctggacaacagggcaaccttacaagctatagcctcagagtttagttcccttccatcatatgcagcttttgctactgctcaagaagcttatgagcaggctgttgctaatggtgattctgaagttgttcttaaaaagttgaagaagtctttgaatgtggctaaatctgaatttgaccgtgatgcagccatgcaacgtaagttggaaaagatggctgatcaagctatgacccaaatgtataaacaggctagatctgaggacaagagggcaaaagttactagtgctatgcagacaatgcttttcactatgcttagaaagttggataatgatgcactcaacaacattatcaacaatgcaagagatggttgtgttcccttgaacataatacctcttacaacagcagccaaactaatggttgtcataccagactataacacatataaaaatacgtgtgatggtacaacatttacttatgcatcagcattgtgggaaatccaacaggttgtagatgcagatagtaaaattgttcaacttagtgaaattagtatggacaattcacctaatttagcatggcctcttattgtaacagctttaagggccaattctgctgtcaaattacagaataatgagcttagtcctgttgcactacgacagatgtcttgtgctgccggtactacacaaactgcttgcactgatgacaatgcgttagcttactacaacacaacaaagggaggtaggtttgtacttgcactgttatccgatttacaggatttgaaatgggctagattccctaagagtgatggaactggtactatctatacagaactggaaccaccttgtaggtttgttacagacacacctaaaggtcctaaagtgaagtatttatactttattaaaggattaaacaacctaaatagaggtatggtacttggtagtttagctgccacagtacgtctacaagctggtaatgcaacagaagtgcctgccaattcaactgtattatctttctgtgcttttgctgtagatgctgctaaagcttacaaagattatctagctagtgggggacaaccaatcactaattgtgttaagatgttgtgtacacacactggtactggtcaggcaataacagttacaccggaagccaatatggatcaagaatcctttggtggtgcatcgtgttgtctgtactgccgttgccacatagatcatccaaatcctaaaggattttgtgacttaaaaggtaagtatgtacaaatacctacaacttgtgctaatgaccctgtgggttttacacttaaaaacacagtctgtaccgtctgcggtatgtggaaaggttatggctgtagttgtgatcaactccgcgaacccatgcttcagtcagctgatgcacaatcgtttttaaacgggtttgcggtgtaagtgcagcccgtcttacaccgtgcggcacaggcactagtactgatgtcgtatacagggcttttgacatctacaatgataaagtagctggttttgctaaattcctaaaaactaattgttgtcgcttccaagaaaaggacgaagatgacaatttaattgattcttactttgtagttaagagacacactttctctaactaccaacatgaagaaacaatttataatttacttaaggattgtccagctgttgctaaacatgacttctttaagtttagaatagacggtgacatggtaccacatatatcacgtcaacgtcttactaaatacacaatggcagacctcgtctatgctttaaggcattttgatgaaggtaattgtgacacattaaaagaaatacttgtcacatacaattgttgtgatgatgattatttcaataaaaaggactggtatgattttgtagaaaacccagatatattacgcgtatacgccaacttaggtgaacgtgtacgccaagctttgttaaaaacagtacaattctgtgatgccatgcgaaatgctggtattgttggtgtactgacattagataatcaagatctcaatggtaactggtatgatttcggtgatttcatacaaaccacgccaggtagtggagttcctgttgtagattcttattattcattgttaatgcctatattaaccttgaccagggctttaactgcagagtcacatgttgacactgacttaacaaagccttacattaagtgggatttgttaaaatatgacttcacggaagagaggttaaaactctttgaccgttattttaaatattgggatcagacataccacccaaattgtgttaactgtttggatgacagatgcattctgcattgtgcaaactttaatgttttattctctacagtgttcccacctacaagttttggaccactagtgagaaaaatatttgttgatggtgttccatttgtagtttcaactggataccacttcagagagctaggtgttgtacataatcaggatgtaaacttacatagctctagacttagttttaaggaattacttgtgtatgctgctgaccctgctatgcacgctgcttctggtaatctattactagataaacgcactacgtgcttttcagtagctgcacttactaacaatgttgcttttcaaactgtcaaacccggtaattttaacaaagacttctatgactttgctgtgtctaagggtttctttaaggaaggaagttctgttgaattaaaacacttcttctttgctcaggatggtaatgctgctatcagcgattatgactactatcgttataatctaccaacaatgtgtgatatcagacaactactatttgtagttgaagttgttgataagtactttgattgttacgatggtggctgtattaatgctaaccaagtcatcgtcaacaacctagacaaatcagctggttttccatttaataaatggggtaaggctagactttattatgattcaatgagttatgaggatcaagatgcacttttcgcatatacaaaacgtaatgtcatccctactataactcaaatgaatcttaagtatgccattagtgcaaagaatagagctcgcaccgtagctggtgtctctatctgtagtactatgaccaatagacagtttcatcaaaaattattgaaatcaatagccgccactagaggagctactgtagtaattggaacaagcaaattctatggtggttggcacaacatgttaaaaactgtttatagtgatgtagaaaaccctcaccttatgggttgggattatcctaaatgtgatagagccatgcctaacatgcttagaattatggcctcacttgttcttgctcgcaaacatacaacgtgttgtagcttgtcacaccgtttctatagattagctaatgagtgtgctcaagtattgagtgaaatggtcatgtgtggcggttcactatatgttaaaccaggtggaacctcatcaggagatgccacaactgcttatgctaatagtgtttttaacatttgtcaagctgtcacggccaatgttaatgcacttttatctactgatggtaacaaaattgccgataagtatgtccgcaatttacaacacagactttatgagtgtctctatagaaatagagatgttgacacagactttgtgaatgagttttacgcatatttgcgtaaacatttctcaatgatgatactctctgacgatgctgttgtgtgtttcaatagcacttatgcatctcaaggtctagtggctagcataaagaactttaagtcagttctttattatcaaaacaatgtttttatgtctgaagcaaaatgttggactgagactgaccttactaaaggacctcatgaattttgctctcaacatacaatgctagttaaacagggtgatgattatgtgtaccttccttacccagatccatcaagaatcctaggggccggctgttttgtagatgatatcgtaaaaacagatggtacacttatgattgaacggttcgtgtctttagctatagatgcttacccacttactaaacatcctaatcaggagtatgctgatgtctttcatttgtacttacaatacataagaaagctacatgatgagttaacaggacacatgttagacatgtattctgttatgcttactaatgataacacttcaaggtattgggaacctgagttttatgaggctatgtacacaccgcatacagtcttacaggctgttggggcttgtgttctttgcaattcacagacttcattaagatgtggtgcttgcatacgtagaccattcttatgttgtaaatgctgttacgaccatgtcatatcaacatcacataaattagtcttgtctgttaatccgtatgtttgcaatgctccaggttgtgatgtcacagatgtgactcaactttacttaggaggtatgagctattattgtaaatcacataaaccacccattagttttccattgtgtgctaatggacaagtttttggtttatataaaaatacatgtgttggtagcgataatgttactgactttaatgcaattgcaacatgtgactggacaaatgctggtgattacattttagctaacacctgtactgaaagactcaagctttttgcagcagaaacgctcaaagctactgaggagacatttaaactgtcttatggtattgctactgtacgtgaagtgctgtctgacagagaattacatctttcatgggaagttggtaaacctagaccaccacttaaccgaaattatgtctttactggttatcgtgtaactaaaaacagtaaagtacaaataggagagtacacctttgaaaaaggtgactatggtgatgctgttgtttaccgaggtacaacaacttacaaattaaatgttggtgattattttgtgctgacatcacatacagtaatgccattaagtgcacctacactagtgccacaagagcactatgttagaattactggcttatacccaacactcaatatctcagatgagttttctagcaatgttgcaaattatcaaaaggttggtatgcaaaagtattctacactccagggaccacctggtactggtaagagtcattttgctattggcctagctctctactacccttctgctcgcatagtgtatacagcttgctctcatgccgctgttgatgcactatgtgagaaggcattaaaatatttgcctatagataaatgtagtagaattatacctgcacgtgctcgtgtagagtgttttgataaattcaaagtgaattcaacattagaacagtatgtcttttgtactgtaaatgcattgcctgagacgacagcagatatagttgtctttgatgaaatttcaatggccacaaattatgatttgagtgttgtcaatgccagattacgtgctaagcactatgtgtacattggcgaccctgctcaattacctgcaccacgcacattgctaactaagggcacactagaaccagaatatttcaattcagtgtgtagacttatgaaaactataggtccagacatgttcctcggaacttgtcggcgttgtcctgctgaaattgttgacactgtgagtgctttggtttatgataataagcttaaagcacataaagacaaatcagctcaatgctttaaaatgttttataagggtgttatcacgcatgatgtttcatctgcaattaacaggccacaaataggcgtggtaagagaattccttacacgtaaccctgcttggagaaaagctgtctttatttcaccttataattcacagaatgctgtagcctcaaagattttgggactaccaactcaaactgttgattcatcacagggctcagaatatgactatgtcatattcactcaaaccactgaaacagctcactcttgtaatgtaaacagatttaatgttgctattaccagagcaaaagtaggcatactttgcataatgtctgatagagacctttatgacaagttgcaatttacaagtcttgaaattccacgtaggaatgtggcaactttacaagctgaaaatgtaacaggactctttaaagattgtagtaaggtaatcactgggttacatcctacacaggcacctacacacctcagtgttgacactaaattcaaaactgaaggtttatgtgttgacatacctggcatacctaaggacatgacctatagaagactcatctctatgatgggttttaaaatgaattatcaagttaatggttaccctaacatgtttatcacccgcgaagaagctataagacatgtacgtgcatggattggcttcgatgtcgaggggtgtcatgctactagagaagctgttggtaccaatttacctttacagctaggtttttctacaggtgttaacctagttgctgtacctacaggttatgttgatacacctaataatacagatttttccagagttagtgctaaaccaccgcctggagatcaatttaaacacctcataccacttatgtacaaaggacttccttggaatgtagtgcgtataaagattgtacaaatgttaagtgacacacttaaaaatctctctgacagagtcgtatttgtcttatgggcacatggctttgagttgacatctatgaagtattttgtgaaaataggacctgagcgcacctgttgtctatgtgatagacgtgccacatgcttttccactgcttcagacacttatgcctgttggcatcattctattggatttgattacgtctataatccgtttatgattgatgttcaacaatggggttttacaggtaacctacaaagcaaccatgatctgtattgtcaagtccatggtaatgcacatgtagctagttgtgatgcaatcatgactaggtgtctagctgtccacgagtgctttgttaagcgtgttgactggactattgaatatcctataattggtgatgaactgaagattaatgcggcttgtagaaaggttcaacacatggttgttaaagctgcattattagcagacaaattcccagttcttcacgacattggtaaccctaaagctattaagtgtgtacctcaagctgatgtagaatggaagttctatgatgcacagccttgtagtgacaaagcttataaaatagaagaattattctattcttatgccacacattctgacaaattcacagatggtgtatgcctattttggaattgcaatgtcgatagatatcctgctaattccattgtttgtagatttgacactagagtgctatctaaccttaacttgcctggttgtgatggtggcagtttgtatgtaaataaacatgcattccacacaccagcttttgataaaagtgcttttgttaatttaaaacaattaccatttttctattactctgacagtccatgtgagtctcatggaaaacaagtagtgtcagatatagattatgtaccactaaagtctgctacgtgtataacacgttgcaatttaggtggtgctgtctgtagacatcatgctaatgagtacagattgtatctcgatgcttataacatgatgatctcagctggctttagcttgtgggtttacaaacaatttgatacttataacctctggaacacttttacaagacttcagagtttagaaaatgtggcttttaatgttgtaaataagggacactttgatggacaacagggtgaagtaccagtttctatcattaataacactgtttacacaaaagttgatggtgttgatgtagaattgtttgaaaataaaacaacattacctgttaatgtagcatttgagctttgggctaagcgcaacattaaaccagtaccagaggtgaaaatactcaataatttgggtgtggacattgctgctaatactgtgatctgggactacaaaagagatgctccagcacatatatctactattggtgtttgttctatgactgacatagccaagaaaccaactgaaacgatttgtgcaccactcactgtcttttttgatggtagagttgatggtcaagtagacttatttagaaatgcccgtaatggtgttcttattacagaaggtagtgttaaaggtttacaaccatctgtaggtcccaaacaagctagtcttaatggagtcacattaattggagaagccgtaaaaacacagttcaattattataagaaagttgatggtgttgtccaacaattacctgaaacttactttactcagagtagaaatttacaagaatttaaacccaggagtcaaatggaaattgatttcttagaattagctatggatgaattcattgaacggtataaattagaaggctatgccttcgaacatatcgtttatggagattttagtcatagtcagttaggtggtttacatctactgattggactagctaaacgttttaaggaatcaccttttgaattagaagattttattcctatggacagtacagttaaaaactatttcataacagatgcgcaaacaggttcatctaagtgtgtgtgttctgttattgatttattacttgatgattttgttgaaataataaaatcccaagatttatctgtagtttctaaggttgtcaaagtgactattgactatacagaaatttcatttatgctttggtgtaaagatggccatgtagaaacattttacccaaaattacaatctagtcaagcgtggcaaccgggtgttgctatgcctaatctttacaaaatgcaaagaatgctattagaaaagtgtgaccttcaaaattatggtgatagtgcaacattacctaaaggcataatgatgaatgtcgcaaaatatactcaactgtgtcaatatttaaacacattaacattagctgtaccctataatatgagagttatacattttggtgctggttctgataaaggagttgcaccaggtacagctgttttaagacagtggttgcctacgggtacgctgcttgtcgattcagatcttaatgactttgtctctgatgcagattcaactttgattggtgattgtgcaactgtacatacagctaataaatgggatctcattattagtgatatgtacgaccctaagactaaaaatgttacaaaagaaaatgactctaaagagggttttttcacttacatttgtgggtttatacaacaaaagctagctcttggaggttccgtggctataaagataacagaacattcttggaatgctgatctttataagctcatgggacacttcgcatggtggacagcctttgttactaatgtgaatgcgtcatcatctgaagcatttttaattggatgtaattatcttggcaaaccacgcgaacaaatagatggttatgtcatgcatgcaaattacatattttggaggaatacaaatccaattcagttgtcttcctattctttatttgacatgagtaaatttccccttaaattaaggggtactgctgttatgtctttaaaagaaggtcaaatcaatgatatgattttatctcttcttagtaaaggtagacttataattagagaaaacaacagagttgttatttctagtgatgttcttgttaacaactaaacgaacaatgtttgtttttcttgttttattgccactagtctctagtcagtgtgttaatcttacaaccagaactcaattaccccctgcatacactaattctttcacacgtggtgtttattaccctgacaaagttttcagatcctcagttttacattcaactcaggacttgttcttacctttcttttccaatgttacttggttccatgctatacatgtctctgggaccaatggtactaagaggtttgataaccctgtcctaccatttaatgatggtgtttattttgcttccactgagaagtctaacataataagaggctggatttttggtactactttagattcgaagacccagtccctacttattgttaataacgctactaatgttgttattaaagtctgtgaatttcaattttgtaatgatccatttttgggtgtttattaccacaaaaacaacaaaagttggatggaaagtgagttcagagtttattctagtgcgaataattgcacttttgaatatgtctctcagccttttcttatggaccttgaaggaaaacagggtaatttcaaaaatcttagggaatttgtgtttaagaatattgatggttattttaaaatatattctaagcacacgcctattaatttagtgcgtgatctccctcagggtttttcggctttagaaccattggtagatttgccaataggtattaacatcactaggtttcaaactttacttgctttacatagaagttatttgactcctggtgattcttcttcaggttggacagctggtgctgcagcttattatgtgggttatcttcaacctaggacttttctattaaaatataatgaaaatggaaccattacagatgctgtagactgtgcacttgaccctctctcagaaacaaagtgtacgttgaaatccttcactgtagaaaaaggaatctatcaaacttctaactttagagtccaaccaacagaatctattgttagatttcctaatattacaaacttgtgcccttttggtgaagtttttaacgccaccagatttgcatctgtttatgcttggaacaggaagagaatcagcaactgtgttgctgattattctttcctatataattccgcatcattttccacttttaagtgttatggagtgtctcctactaaattaaatgatctctgctttactaatgtctatgcagattcatttgtaattagaggtgatgaagtcagacaaatcgctccagggcaaactggaaagattgctgattataattataaattaccagatgattttacaggctgcgttatagcttggaattctaacaatcttgattctaaggttggtggtaattataattacctgtatagattgtttaggaagtctaatctcaaaccttttgagagagatatttcaactgaaatctatcaggccggtagcacaccttgtaatggtgttgaaggttttaattgttactttcctttacaatcatatggtttccaacccactaatggtgttggttaccaaccatacagagtagtagtactttcttttgaacttctacatgcaccagcaactgtttgtggacctaaaaagtctactaatttggttaaaaacaaatgtgtcaatttcaacttcaatggtttaacaggcacaggtgttcttactgagtctaacaaaaagtttctgcctttccaacaatttggcagagacattgctgacactactgatgctgtccgtgatccacagacacttgagattcttgacattacaccatgttcttttggtggtgtcagtgttataacaccaggaacaaatacttctaaccaggttgctgttctttatcaggatgttaactgcacagaagtccctgttgctattcatgcagatcaacttactcctacttggcgtgtttattctacaggttctaatgtttttcaaacacgtgcaggctgtttaataggggctgaacatgtcaacaactcatatgagtgtgacatacccattggtgcaggtatatgcgctagttatcagactcagactaattctcctcggcgggcacgtagtgtagctagtcaatccatcattgcctacactatgtcacttggtgcagaaaattcagttgcttactctaataactctattgccatacccacaaattttactattagtgttaccacagaaattctaccagtgtctatgaccaagacatcagtagattgtacaatgtacatttgtggtgattcaactgaatgcagcaatcttttgttgcaatatggcagtttttgtacacaattaaaccgtgctttaactggaatagctgttgaacaagacaaaaacacccaagaagtttttgcacaagtcaaacaaatttacaaaacaccaccaattaaagattttggtggttttaatttttcacaaatattaccagatccatcaaaaccaagcaagaggtcatttattgaagatctacttttcaacaaagtgacacttgcagatgctggcttcatcaaacaatatggtgattgccttggtgatattgctgctagagacctcatttgtgcacaaaagtttaacggccttactgttttgccacctttgctcacagatgaaatgattgctcaatacacttctgcactgttagcgggtacaatcacttctggttggacctttggtgcaggtgctgcattacaaataccatttgctatgcaaatggcttataggtttaatggtattggagttacacagaatgttctctatgagaaccaaaaattgattgccaaccaatttaatagtgctattggcaaaattcaagactcactttcttccacagcaagtgcacttggaaaacttcaagatgtggtcaaccaaaatgcacaagctttaaacacgcttgttaaacaacttagctccaattttggtgcaatttcaagtgttttaaatgatatcctttcacgtcttgacaaagttgaggctgaagtgcaaattgataggttgatcacaggcagacttcaaagtttgcagacatatgtgactcaacaattaattagagctgcagaaatcagagcttctgctaatcttgctgctactaaaatgtcagagtgtgtacttggacaatcaaaaagagttgatttttgtggaaagggctatcatcttatgtccttccctcagtcagcacctcatggtgtagtcttcttgcatgtgacttatgtccctgcacaagaaaagaacttcacaactgctcctgccatttgtcatgatggaaaagcacactttcctcgtgaaggtgtctttgtttcaaatggcacacactggtttgtaacacaaaggaatttttatgaaccacaaatcattactacagacaacacatttgtgtctggtaactgtgatgttgtaataggaattgtcaacaacacagtttatgatcctttgcaacctgaattagactcattcaaggaggagttagataaatattttaagaatcatacatcaccagatgttgatttaggtgacatctctggcattaatgcttcagttgtaaacattcaaaaagaaattgaccgcctcaatgaggttgccaagaatttaaatgaatctctcatcgatctccaagaacttggaaagtatgagcagtatataaaatggccatggtacatttggctaggttttatagctggcttgattgccatagtaatggtgacaattatgctttgctgtatgaccagttgctgtagttgtctcaagggctgttgttcttgtggatcctgctgcaaatttgatgaagacgactctgagccagtgctcaaaggagtcaaattacattacacataaacgaacttatggatttgtttatgagaatcttcacaattggaactgtaactttgaagcaaggtgaaatcaaggatgctactccttcagattttgttcgcgctactgcaacgataccgatacaagcctcactccctttcggatggcttattgttggcgttgcacttcttgctgtttttcagagcgcttccaaaatcataaccctcaaaaagagatggcaactagcactctccaagggtgttcactttgtttgcaacttgctgttgttgtttgtaacagtttactcacaccttttgctcgttgctgctggccttgaagccccttttctctatctttatgctttagtctacttcttgcagagtataaactttgtaagaataataatgaggctttggctttgctggaaatgccgttccaaaaacccattactttatgatgccaactattttctttgctggcatactaattgttacgactattgtataccttacaatagtgtaacttcttcaattgtcattacttcaggtgatggcacaacaagtcctatttctgaacatgactaccagattggtggttatactgaaaaatgggaatctggagtaaaagactgtgttgtattacacagttacttcacttcagactattaccagctgtactcaactcaattgagtacagacactggtgttgaacatgttaccttcttcatctacaataaaattgttgatgagcctgaagaacatgtccaaattcacacaatcgacgtttcatccggagttgttaatccagtaatggaaccaatttatgatgaaccgacgacgactactagcgtgcctttgtaagcacaagctgatgagtacgaacttatgtactcattcgtttcggaagagacaggtacgttaatagttaatagcgtacttctttttcttgctttcgtggtattcttgctagttacactagccatccttactgcgcttcgattgtgtgcgtactgctgcaatattgttaacgtgagtcttgtaaaaccttctttttacgtttactctcgtgttaaaaatctgaattcttctagagttcctgatcttctggtctaaacgaactaaatattatattagtttttctgtttggaactttaattttagccatggcagattccaacggtactattaccgttgaagagcttaaaaagctccttgaacaatggaacctagtaataggtttcctattccttacatggatttgtcttctacaatttgcctatgccaacaggaataggtttttgtatataattaagttaattttcctctggctgttatggccagtaactttagcttgttttgtgcttgctgctgtttacagaataaattggatcaccggtggaattgctatcgcaatggcttgtcttgtaggcttgatgtggctcagctacttcattgcttctttcagactgtttgcgcgtacgcgttccatgtggtcattcaatccagaaactaacattcttctcaacgtgccactccatggcactattctgaccagaccgcttctagaaagtgaactcgtaatcggagctgtgatccttcgtggacatcttcgtattgctggacaccatctaggacgctgtgacatcaaggacctgcctaaagaaatcactgttgctacatcacgaacgctttcttattacaaattgggagcttcgcagcgtgtagcaggtgactcaggttttgctgcatacagtcgctacaggattggcaactataaattaaacacagaccattccagtagcagtgacaatattgctttgcttgtacagtaagtgacaacagatgtttcatctcgttgactttcaggttactatagcagagatattactaattattatgaggacttttaaagtttccatttggaatcttgattacatcataaacctcataattaaaaatttatctaagtcactaactgagaataaatattctcaattagatgaagagcaaccaatggagattgattaaacgaacatgaaaattattcttttcttggcactgataacactcgctacttgtgagctttatcactaccaagagtgtgttagaggtacaacagtacttttaaaagaaccttgctcttctggaacatacgagggcaattcaccatttcatcctctagctgataacaaatttgcactgacttgctttagcactcaatttgcttttgcttgtcctgacggcgtaaaacacgtctatcagttacgtgccagatcagtttcacctaaactgttcatcagacaagaggaagttcaagaactttactctccaatttttcttattgttgcggcaatagtgtttataacactttgcttcacactcaaaagaaagacagaatgattgaactttcattaattgacttctatttgtgctttttagcctttctgctattccttgttttaattatgcttattatcttttggttctcacttgaactgcaagatcataatgaaacttgtcacgcctaaacgaacatgaaatttcttgttttcttaggaatcatcacaactgtagctgcatttcaccaagaatgtagtttacagtcatgtactcaacatcaaccatatgtagttgatgacccgtgtcctattcacttctattctaaatggtatattagagtaggagctagaaaatcagcacctttaattgaattgtgcgtggatgaggctggttctaaatcacccattcagtacatcgatatcggtaattatacagtttcctgtttaccttttacaattaattgccaggaacctaaattgggtagtcttgtagtgcgttgttcgttctatgaagactttttagagtatcatgacgttcgtgttgttttagatttcatctaaacgaacaaactaaaatgtctgataatggaccccaaaatcagcgaaatgcaccccgcattacgtttggtggaccctcagattcaactggcagtaaccagaatggagaacgcagtggggcgcgatcaaaacaacgtcggccccaaggtttacccaataatactgcgtcttggttcaccgctctcactcaacatggcaaggaagaccttaaattccctcgaggacaaggcgttccaattaacaccaatagcagtccagatgaccaaattggctactaccgaagagctaccagacgaattcgtggtggtgacggtaaaatgaaagatctcagtccaagatggtatttctactacctaggaactgggccagaagctggacttccctatggtgctaacaaagacggcatcatatgggttgcaactgagggagccttgaatacaccaaaagatcacattggcacccgcaatcctgctaacaatgctgcaatcgtgctacaacttcctcaaggaacaacattgccaaaaggcttctacgcagaagggagcagaggcggcagtcaagcctcttctcgttcctcatcacgtagtcgcaacagttcaagaaattcaactccaggcagcagtaggggaacttctcctgctagaatggctggcaatggcggtgatgctgctcttgctttgctgctgcttgacagattgaaccagcttgagagcaaaatgtctggtaaaggccaacaacaacaaggccaaactgtcactaagaaatctgctgctgaggcttctaagaagcctcggcaaaaacgtactgccactaaagcatacaatgtaacacaagctttcggcagacgtggtccagaacaaacccaaggaaattttggggaccaggaactaatcagacaaggaactgattacaaacattggccgcaaattgcacaatttgcccccagcgcttcagcgttcttcggaatgtcgcgcattggcatggaagtcacaccttcgggaacgtggttgacctacacaggtgccatcaaattggatgacaaagatccaaatttcaaagatcaagtcattttgctgaataagcatattgacgcatacaaaacattcccaccaacagagcctaaaaaggacaaaaagaagaaggctgatgaaactcaagccttaccgcagagacagaagaaacagcaaactgtgactcttcttcctgctgcagatttggatgatttctccaaacaattgcaacaatccatgagcagtgctgactcaactcaggcctaaactcatgcagaccacacaaggcagatgggctatataaacgttttcgcttttccgtttacgatatatagtctactcttgtgcagaatgaattctcgtaactacatagcacaagtagatgtagttaactttaatctcacatagcaatctttaatcagtgtgtaacattagggaggacttgaaagagccaccacattttcaccgaggccacgcggagtacgatcgagtgtacagtgaacaatgctagggagagctgcctatatggaagagccctaatgtgtaaaattaattttagtagtgctatccccatgtgattttaatagcttcttaggagaatgacaaaa

SEQ ID NO: 13 - protein, 4405 aa, SARS-CoV2 [sequence omitted]

SEQ ID NO: 14 - protein, 1273 aa, SARS-CoV2
MFVFLVLLPLVSSQCVNLTTRTQLPPAYTNSFTRGVYYPDKVFRSSVLHSTQDLFLPFFSNVTWFHAIHVSGTNGTKRFDNPVLPFNDGVYFASTEKSNIIRGWIFGTTLDSKTQSLLIVNNATNVVIKVCEFQFCNDPFLGVYYHKNNKSWMESEFRVYSSANNCTFEYVSQPFLMDLEGKQGNFKNLREFVFKNIDGYFKIYSKHTPINLVRDLPQGFSALEPLVDLPIGINITRFQTLLALHRSYLTPGDSSSGWTAGAAAYYVGYLQPRTFLLKYNENGTITDAVDCALDPLSETKCTLKSFTVEKGIYQTSNFRVQPTESIVRFPNITNLCPFGEVFNATRFASVYAWNRKRISNCVADYSFLYNSASFSTFKCYGVSPTKLNDLCFTNVYADSFVIRGDEVRQIAPGQTGKIADYNYKLPDDFTGCVIAWNSNNLDSKVGGNYNYLYRLFRKSNLKPFERDISTEIYQAGSTPCNGVEGFNCYFPLQSYGFQPTNGVGYQPYRVVVLSFELLHAPATVCGPKKSTNLVKNKCVNFNFNGLTGTGVLTESNKKFLPFQQFGRDIADTTDAVRDPQTLEILDITPCSFGGVSVITPGTNTSNQVAVLYQDVNCTEVPVAIHADQLTPTWRVYSTGSNVFQTRAGCLIGAEHVNNSYECDIPIGAGICASYQTQTNSPRRARSVASQSIIAYTMSLGAENSVAYSNNSIAIPTNFTISVTTEILPVSMTKTSVDCTMYICGDSTECSNLLLQYGSFCTQLNRALTGIAVEQDKNTQEVFAQVKQIYKTPPIKDFGGFNFSQILPDPSKPSKRSFIEDLLFNKVTLADAGFIKQYGDCLGDIAARDLICAQKFNGLTVLPPLLTDEMIAQYTSALLAGTITSGWTFGAGAALQIPFAMQMAYRFNGIGVTQNVLYENQKLIANQFNSAIGKIQDSLSSTASALGKLQDVVNQNAQALNTLVKQLSSNFGAISSVLNDILSRLDKVEAEVQIDRLITGRLQSLQTYVTQQLIRAAEIRASANLAATKMSECVLGQSKRVDFCGKGYHLMSFPQSAPHGVVFLHVTYVPAQEKNFTTAPAICHDGKAHFPREGVFVSNGTHWFVTQRNFYEPQIITTDNTFVSGNCDVVIGIVNNTVYDPLQPELDSFKEELDKYFKNHTSPDVDLGDISGINASVVNIQKEIDRLNEVAKNLNESLIDLQELGKYEQYIKWPWYIWLGFIAGLIAIVMVTIMLCCMTSCCSCLKGCCSCGSCCKFDEDDSEPVLKGVKLHYT

SEQ ID NO: 15 - DNA, 29885 bp, SARS-CoV2
  misc_feature (1)..(30): n is a, c, g, or t
  misc_feature (29865)..(29865): n is a, c, g, or t
  misc_feature (29872)..(29885): n is a, c, g, or t
nnnnnnnnnnnnnnnnnnnnnnnnnnnnnnaccaaccaactttcgatctcttgtagatctgttctctaaacgaactttaaaatctgtgtggctgtcactcggctgcatgcttagtgcactcacgcagtataattaataactaattactgtcgttgacaggacacgagtaactcgtctatcttctgcaggctgcttacggtttcgtccgtgttgcagccgatcatcagcacatctaggttttgtccgggtgtgaccgaaaggtaagatggagagccttgtccctggtttcaacgagaaaacacacgtccaactcagtttgcctgttttacaggttcgcgacgtgctcgtacgtggctttggagactccgtggaggaggtcttatcagaggcacgtcaacatcttaaagatggcacttgtggcttagtagaagttgaaaaaggcgttttgcctcaacttgaacagccctatgtgttcatcaaacgttcggatgctcgaactgcacctcatggtcatgttatggttgagctggtagcagaactcgaaggcattcagtacggtcgtagtggtgagacacttggtgtccttgtccctcatgtgggcgaaataccagtggcttaccgcaaggttcttcttcgtaagaacggtaataaaggagctggtggccatagttacggcgccgatctaaagtcatttgacttaggcgacgagcttggcactgatccttatgaagattttcaagaaaactggaacactaaacatagcagtggtgttacccgtgaactcatgcgtgagcttaacggaggggcatacactcgctatgtcgataacaacttctgtggccctgatggctaccctcttgagtgcattaaagaccttctagcacgtgctggtaaagcttcatgcactttgtccgaacaactggactttattgacactaagaggggtgtatactgctgccgtgaacatgagcatgaaattgcttggtacacggaacgttctgaaaagagctatgaattgcagacaccttttgaaattaaattggcaaagaaatttgacaccttcaatggggaatgtccaaattttgtatttcccttaaattccataatcaagactattcaaccaagggttgaaaagaaaaagcttgatggctttatgggtagaattcgatctgtctatccagttgcgtcaccaaatgaatgcaaccaaatgtgcctttcaactctcatgaagtgtgatcattgtggtgaaacttcatggcagacgggcgattttgttaaagccacttgcgaattttgtggcactgagaatttgactaaagaaggtgccactacttgtggttacttaccccaaaatgctgttgttaaaatttattgtccagcatgtcacaattcagaagtaggacctgagcatagtcttgccgaataccataatgaatctggcttgaaaaccattcttcgtaagggtggtcgcactattgcctttggaggctgtgtgttctcttatgttggttgccataacaagtgtgcctattgggttccacgtgctagcgctaacataggttgtaaccatacaggtgttgttggagaaggttccgaaggtcttaatgacaaccttcttgaaatactccaaaaagagaaagtcaacatcaatattgttggtgactttaaacttaatgaagagatcgccattattttggcatctttttctgcttccacaagtgcttttgtggaaactgtgaaaggtttggattataaagcattcaaacaaattgttgaatcctgtggtaattttaaagttacaaaaggaaaagctaaaaaaggtgcctggaatattggtgaacagaaatcaatactgagtcctctttatgcatttgcatcagaggctgctcgtgttgtacgatcaattttctcccgcactcttgaaactgctcaaaattctgtgcgtgttttacagaaggccgctataacaatactagatggaatttcacagtattcactgagactcattgatgctatgatgttcacatctgatttggctactaacaatctagttgtaatggcctacattacaggtggtgttgttcagttgacttcgcagtggctaactaacatctttggcactgtttatgaaaaactcaaacccgtccttgattggcttgaagagaagtttaaggaaggtgtagagtttcttagagacggttgggaaattgttaaatttatctcaacctgtgcttgtgaaattgtcggtggacaaattgtcacctgtgcaaaggaaattaaggagagtgttcagacattctttaagcttgtaaataaatttttggctttgtgtgctgactctatcattattggtggagctaaacttaaagccttgaatttaggtgaaacatttgtcacgcactcaaagggattgtacagaaagtgtgttaaatccagagaagaaactggcctactcatgcctctaaaagccccaaaagaaattatcttcttagagggagaaacacttcccacagaagtgttaacagaggaagttgtcttgaaaactggtgatttacaaccattagaacaacctactagtgaagctgttgaagctccattggttggtacaccagtttgtattaacgggcttatgttgctcgaaatcaaagacacagaaaagtactgtgcccttgcacctaatatgatggtaacaaacaataccttcacactcaaaggcggtgcaccaacaaaggttacttttggtgatgacactgtgatagaagtgcaaggttacaagagtgtgaatatcacttttgaacttgatgaaaggattgataaagtacttaatgagaagtgctctgcctatacagttgaactcggtacagaagtaaatgagttcgcctgtgttgtggcagatgctgtcataaaaactttgcaaccagtatctgaattacttacaccactgggcattgatttagatgagtggagtatggctacatactacttatttgatgagtctggtgagtttaaattggcttcacatatgtattgttctttttaccctccagatgaggatgaagaagaaggtgattgtgaagaagaagagtttgagccatcaactcaatatgagtatggtactgaagatgattaccaaggtaaacctttggaatttggtgccacttctgctgctcttcaacctgaagaagagcaagaagaagattggttagatgatgatagtcaacaaactgttggtcaacaagacggcagtgaggacaatcagacaactactattcaaacaattgttgaggttcaacctcaattagagatggaacttacaccagttgttcagactattgaagtgaatagttttagtggttatttaaaacttactgacaatgtatacattaaaaatgcagacattgtggaagaagctaaaaaggtaaaaccaacagtggttgttaatgcagccaatgtttaccttaaacatggaggaggtgttgcaggagccttaaataaggctactaacaatgccatgcaagttgaatctgatgattacatagctactaatggaccacttaaagtgggtggtagttgtgttttaagcggacacaatcttgctaaacactgtcttcatgttgtcggcccaaatgttaacaaaggtgaagacattcaacttcttaagagtgcttatgaaaattttaatcagcacgaagttctacttgcaccattattatcagctggtatttttggtgctgaccctatacattctttaagagtttgtgtagatactgttcgcacaaatgtctacttagctgtctttgataaaaatctctatgacaaacttgtttcaagctttttggaaatgaagagtgaaaagcaagttgaacaaaagatcgctgagattcctaaagaggaagttaagccatttataactgaaagtaaaccttcagttgaacagagaaaacaagatgataagaaaatcaaagcttgtgttgaagaagttacaacaactctggaagaaactaagttcctcacagaaaacttgttactttatattgacattaatggcaatcttcatccagattctgccactcttgttagtgacattgacatcactttcttaaagaaagatgctccatatatagtgggtgatgttgttcaagagggtgttttaactgctgtggttatacctactaaaaaggctggtggcactactgaaatgctagcgaaagctttgagaaaagtgccaacagacaattatataaccacttacccgggtcagggtttaaatggttacactgtagaggaggcaaagacagtgcttaaaaagtgtaaaagtgccttttacattctaccatctattatctctaatgagaagcaagaaattcttggaactgtttcttggaatttgcgagaaatgcttgcacatgcagaagaaacacgcaaattaatgcctgtctgtgtggaaactaaagccatagtttcaactatacagcgtaaatataagggtattaaaatacaagagggtgtggttgattatggtgctagattttacttttacaccagtaaaacaactgtagcgtcacttatcaacacacttaacgatctaaatgaaactcttgttacaatgccacttggctatgtaacacatggcttaaatttggaagaagctgctcggtatatgagatctctcaaagtgccagctacagtttctgtttcttcacctgatgctgttacagcgtataatggttatcttacttcttcttctaaaacacctgaagaacattttattgaaaccatctcacttgctggttcctataaagattggtcctattctggacaatctacacaactaggtatagaatttcttaagagaggtgataaaagtgtatattacactagtaatcctaccacattccacctagatggtgaagttatcacctttgacaatcttaagacacttctttctttgagagaagtgaggactattaaggtgtttacaacagtagacaacattaacctccacacgcaagttgtggacatgtcaatgacatatggacaacagtttggtccaacttatttggatggagctgatgttactaaaataaaacctcataattcacatgaaggtaaaacattttatgttttacctaatgatgacactctacgtgttgaggcttttgagtactaccacacaactgatcctagttttctgggtaggtacatgtcagcattaaatcacactaaaaagtggaaatacccacaagttaatggtttaacttctattaaatgggcagataacaactgttatcttgccactgcattgttaacactccaacaaatagagttgaagtttaatccacctgctctacaagatgcttattacagagcaagggctggtgaagctgctaacttttgtgcacttatcttagcctactgtaataagacagtaggtgagttaggtgatgttagagaaacaatgagttacttgtttcaacatgccaatttagattcttgcaaaagagtcttgaacgtggtgtgtaaaacttgtggacaacagcagacaacccttaagggtgtagaagctgttatgtacatgggcacactttcttatgaacaatttaagaaaggtgttcagataccttgtacgtgtggtaaacaagctacaaaatatctagtacaacaggagtcaccttttgttatgatgtcagcaccacctgctcagtatgaacttaagcatggtacatttacttgtgctagtgagtacactggtaattaccagtgtggtcactataaacatataacttctaaagaaactttgtattgcatagacggtgctttacttacaaagtcctcagaatacaaaggtcctattacggatgttttctacaaagaaaacagttacacaacaaccataaaaccagttacttataaattggatggtgttgtttgtacagaaattgaccctaagttggacaattattataagaaagacaattcttatttcacagagcaaccaattgatcttgtaccaaaccaaccatatccaaacgcaagcttcgataattttaagtttgtatgtgataatatcaaatttgctgatgatttaaaccagttaactggttataagaaacctgcttcaagagagcttaaagttacatttttccctgacttaaatggtgatgtggtggctattgattataaacactacacaccctcttttaagaaaggagctaaattgttacataaacctattgtttggcatgttaacaatgcaactaataaagccacgtataaaccaaatacctggtgtatacgttgtctttggagcacaaaaccagttgaaacatcaaattcgtttgatgtactgaagtcagaggacgcgcagggaatggataatcttgcctgcgaagatctaaaaccagtctctgaagaagtagtggaaaatcctaccatacagaaagacgttcttgagtgtaatgtgaaaactaccgaagttgtaggagacattatacttaaaccagcaaataatagtttaaaaattacagaagaggttggccacacagatctaatggctgcttatgtagacaattctagtcttactattaagaaacctaatgaattatctagagtattaggtttgaaaacccttgctactcatggtttagctgctgttaatagtgtcccttgggatactatagctaattatgctaagccttttcttaacaaagttgttagtacaactactaacatagttacacggtgtttaaaccgtgtttgtactaattatatgccttatttctttactttattgctacaattgtgtacttttactagaagtacaaattctagaattaaagcatctatgccgactactatagcaaagaatactgttaagagtgtcggtaaattttgtctagaggcttcatttaattatttgaagtcacctaatttttctaaactgataaatattataatttggtttttactattaagtgtttgcctaggttctttaatctactcaaccgctgctttaggtgttttaatgtctaatttaggcatgccttcttactgtactggttacagagaaggctatttgaactctactaatgtcactattgcaacctactgtactggttctataccttgtagtgtttgtcttagtggtttagattctttagacacctatccttctttagaaactatacaaattaccatttcatcttttaaatgggatttaactgcttttggcttagttgcagagtggtttttggcatatattcttttcactaggtttttctatgtacttggattggctgcaatcatgcaattgtttttcagctattttgcagtacattttattagtaattcttggcttatgtggttaataattaatcttgtacaaatggccccgatttcagctatggttagaatgtacatcttctttgcatcattttattatgtatggaaaagttatgtgcatgttgtagacggttgtaattcatcaacttgtatgatgtgttacaaacgtaatagagcaacaagagtcgaatgtacaactattgttaatggtgttagaaggtccttttatgtctatgctaatggaggtaaaggcttttgcaaactacacaattggaattgtgttaattgtgatacattctgtgctggtagtacatttattagtgatgaagttgcgagagacttgtcactacagtttaaaagaccaataaatcctactgaccagtcttcttacatcgttgatagtgttacagtgaagaatggttccatccatctttactttgataaagctggtcaaaagacttatgaaagacattctctctctcattttgttaacttagacaacctgagagctaataacactaaaggttcattgcctattaatgttatagtttttgatggtaaatcaaaatgtgaagaatcatctgcaaaatcagcgtctgtttactacagtcagcttatgtgtcaacctatactgttactagatcaggcattagtgtctgatgttggtgatagtgcggaagttgcagttaaaatgtttgatgcttacgttaatacgttttcatcaacttttaacgtaccaatggaaaaactcaaaacactagttgcaactgcagaagctgaacttgcaaagaatgtgtccttagacaatgtcttatctacttttatttcagcagctcggcaagggtttgttgattcagatgtagaaactaaagatgttgttgaatgtcttaaattgtcacatcaatctgacatagaagttactggcgatagttgtaataactatatgctcacctataacaaagttgaaaacatgacaccccgtgaccttggtgcttgtattgactgtagtgcgcgtcatattaatgcgcaggtagcaaaaagtcacaacattgctttgatatggaacgttaaagatttcatgtcattgtctgaacaactacgaaaacaaatacgtagtgctgctaaaaagaataacttaccttttaagttgacatgtgcaactactagacaagttgttaatgttgtaacaacaaagatagcacttaagggtggtaaaattgttaataattggttgaagcagttaattaaagttacacttgtgttcctttttgttgctgctattttctatttaataacacctgttcatgtcatgtctaaacatactgacttttcaagtgaaatcataggatacaaggctattgatggtggtgtcactcgtgacatagcatctacagatacttgttttgctaacaaacatgctgattttgacacatggtttagccagcgtggtggtagttatactaatgacaaagcttgcccattgattgctgcagtcataacaagagaagtgggttttgtcgtgcctggtttgcctggcacgatattacgcacaactaatggtgactttttgcatttcttacctagagtttttagtgcagttggtaacatctgttacacaccatcaaaacttatagagtacactgactttgcaacatcagcttgtgttttggctgctgaatgtacaatttttaaagatgcttctggtaagccagtaccatattgttatgataccaatgtactagaaggttctgttgcttatgaaagtttacgccctgacacacgttatgtgctcatggatggctctattattcaatttcctaacacctaccttgaaggttctgttagagtggtaacaacttttgattctgagtactgtaggcacggcacttgtgaaagatcagaagctggtgtttgtgtatctactagtggtagatgggtacttaacaatgattattacagatctttaccaggagttttctgtggtgtagatgctgtaaatttacttactaatatgtttacaccactaattcaacctattggtgctttggacatatcagcatctatagtagctggtggtattgtagctatcgtagtaacatgccttgcctactattttatgaggtttagaagagcttttggtgaatacagtcatgtagttgcctttaatactttactattccttatgtcattcactgtactctgtttaacaccagtttactcattcttacctggtgtttattctgttatttacttgtacttgacattttatcttactaatgatgtttcttttttagcacatattcagtggatggttatgttcacacctttagtacctttctggataacaattgcttatatcatttgtatttccacaaagcatttctattggttctttagtaattacctaaagagacgtgtagtctttaatggtgtttcctttagtacttttgaagaagctgcgctgtgcacctttttgttaaataaagaaatgtatctaaagttgcgtagtgatgtgctattacctcttacgcaatataatagatacttagctctttataataagtacaagtattttagtggagcaatggatacaactagctacagagaagctgcttgttgtcatctcgcaaaggctctcaatgacttcagtaactcaggttctgatgttctttaccaaccaccacaaacctctatcacctcagctgttttgcagagtggttttagaaaaatggcattcccatctggtaaagttgagggttgtatggtacaagtaacttgtggtacaactacacttaacggtctttggcttgatgacgtagtttactgtccaagacatgtgatctgcacctctgaagacatgcttaaccctaattatgaagatttactcattcgtaagtctaatcataatttcttggtacaggctggtaatgttcaactcagggttattggacattctatgcaaaattgtgtacttaagcttaaggttgatacagccaatcctaagacacctaagtataagtttgttcgcattcaaccaggacagactttttcagtgttagcttgttacaatggttcaccatctggtgtttaccaatgtgctatgaggcccaatttcactattaagggttcattccttaatggttcatgtggtagtgttggttttaacatagattatgactgtgtctctttttgttacatgcaccatatggaattaccaactggagttcatgctggcacagacttagaaggtaacttttatggaccttttgttgacaggcaaacagcacaagcagctggtacggacacaactattacagttaatgttttagcttggttgtacgctgctgttataaatggagacaggtggtttctcaatcgatttaccacaactcttaatgactttaaccttgtggctatgaagtacaattatgaacctctaacacaagaccatgttgacatactaggacctctttctgctcaaactggaattgccgttttagatatgtgtgcttcattaaaagaattactgcaaaatggtatgaatggacgtaccatattgggtagtgctttattagaagatgaatttacaccttttgatgttgttagacaatgctcaggtgttactttccaaagtgcagtgaaaagaacaatcaagggtacacaccactggttgttactcacaattttgacttcacttttagttttagtccagagtactcaatggtctttgttcttttttttgtatgaaaatgcctttttaccttttgctatgggtattattgctatgtctgcttttgcaatgatgtttgtcaaacataagcatgcatttctctgtttgtttttgttaccttctcttgccactgtagcttattttaatatggtctatatgcctgctagttgggtgatgcgtattatgacatggttggatatggttgatactagtttgtctggttttaagctaaaagactgtgttatgtatgcatcagctgtagtgttactaatccttatgacagcaagaactgtgtatgatgatggtgctaggagagtgtggacacttatgaatgtcttgacactcgtttataaagtttattatggtaatgctttagatcaagccatttccatgtgggctcttataatctctgttacttctaactactcaggtgtagttacaactgtcatgtttttggccagaggtattgtttttatgtgtgttgagtattgccctattttcttcataactggtaatacacttcagtgtataatgctagtttattgtttcttaggctatttttgtacttgttactttggcctcttttgtttactcaaccgctactttagactgactcttggtgtttatgattacttagtttctacacaggagtttagatatatgaattcacagggactactcccacccaagaatagcatagatgccttcaaactcaacattaaattgttgggtgttggtggcaaaccttgtatcaaagtagccactgtacagtctaaaatgtcagatgtaaagtgcacatcagtagtcttactctcagttttgcaacaactcagagtagaatcatcatctaaattgtgggctcaatgtgtccagttacacaatgacattctcttagctaaagatactactgaagcctttgaaaaaatggtttcactactttctgttttgctttccatgcagggtgctgtagacataaacaagctttgtgaagaaatgctggacaacagggcaaccttacaagctatagcctcagagtttagttcccttccatcatatgcagcttttgctactgctcaagaagcttatgagcaggctgttgctaatggtgattctgaagttgttcttaaaaagttgaagaagtctttgaatgtggctaaatctgaatttgaccgtgatgcagccatgcaacgtaagttggaaaagatggctgatcaagctatgacccaaatgtataaacaggctagatctgaggacaagagggcaaaagttactagtgctatgcagacaatgcttttcactatgcttagaaagttggataatgatgcactcaacaacattatcaacaatgcaagagatggttgtgttcccttgaacataatacctcttacaacagcagccaaactaatggttgtcataccagactataacacatataaaaatacgtgtgatggtacaacatttacttatgcatcagcattgtgggaaatccaacaggttgtagatgcagatagtaaaattgttcaacttagtgaaattagtatggacaattcacctaatttagcatggcctcttattgtaacagctttaagggccaattctgctgtcaaattacagaataatgagcttagtcctgttgcactacgacagatgtcttgtgctgccggtactacacaaactgcttgcactgatgacaatgcgttagcttactacaacacaacaaagggaggtaggtttgtacttgcactgttatccgatttacaggatttgaaatgggctagattccctaagagtgatggaactggtactatctatacagaactggaaccaccttgtaggtttgttacagacacacctaaaggtcctaaagtgaagtatttatactttattaaaggattaaacaacctaaatagaggtatggtacttggtagtttagctgccacagtacgtctacaagctggtaatgcaacagaagtgcctgccaattcaactgtattatctttctgtgcttttgctgtagatgctgctaaagcttacaaagattatctagctagtgggggacaaccaatcactaattgtgttaagatgttgtgtacacacactggtactggtcaggcaataacagttacaccggaagccaatatggatcaagaatcctttggtggtgcatcgtgttgtctgtactgccgttgccacatagatcatccaaatcctaaaggattttgtgacttaaaaggtaagtatgtacaaatacctacaacttgtgctaatgaccctgtgggttttacacttaaaaacacagtctgtaccgtctgcggtatgtggaaaggttatggctgtagttgtgatcaactccgcgaacccatgcttcagtcagctgatgcacaatcgtttttaaacgggtttgcggtgtaagtgcagcccgtcttacaccgtgcggcacaggcactagtactgatgtcgtatacagggcttttgacatctacaatgataaagtagctggttttgctaaattcctaaaaactaattgttgtcgcttccaagaaaaggacgaagatgacaatttaattgattcttactttgtagttaagagacacactttctctaactaccaacatgaagaaacaatttataatttacttaaggattgtccagctgttgctaaacatgacttctttaagtttagaatagacggtgacatggtaccacatatatcacgtcaacgtcttactaaatacacaatggcagacctcgtctatgctttaaggcattttgatgaaggtaattgtgacacattaaaagaaatacttgtcacatacaattgttgtgatgatgattatttcaataaaaaggactggtatgattttgtagaaaacccagatatattacgcgtatacgccaacttaggtgaacgtgtacgccaagctttgttaaaaacagtacaattctgtgatgccatgcgaaatgctggtattgttggtgtactgacattagataatcaagatctcaatggtaactggtatgatttcggtgatttcatacaaaccacgccaggtagtggagttcctgttgtagattcttattattcattgttaatgcctatattaaccttgaccagggctttaactgcagagtcacatgttgacactgacttaacaaagccttacattaagtgggatttgttaaaatatgacttcacggaagagaggttaaaactctttgaccgttattttaaatattgggatcagacataccacccaaattgtgttaactgtttggatgacagatgcattctgcattgtgcaaactttaatgttttattctctacagtgttcccacttacaagttttggaccactagtgagaaaaatatttgttgatggtgttccatttgtagtttcaactggataccacttcagagagctaggtgttgtacataatcaggatgtaaacttacatagctctagacttagttttaaggaattacttgtgtatgctgctgaccctgctatgcacgctgcttctggtaatctattactagataaacgcactacgtgcttttcagtagctgcacttactaacaatgttgcttttcaaactgtcaaacccggtaattttaacaaagacttctatgactttgctgtgtctaagggtttctttaaggaaggaagttctgttgaattaaaacacttcttctttgctcaggatggtaatgctgctatcagcgattatgactactatcgttataatctaccaacaatgtgtgatatcagacaactactatttgtagttgaagttgttgataagtactttgattgttacgatggtggctgtattaatgctaaccaagtcatcgtcaacaacctagacaaatcagctggttttccatttaataaatggggtaaggctagactttattatgattcaatgagttatgaggatcaagatgcacttttcgcatatacaaaacgtaatgtcatccctactataactcaaatgaatcttaagtatgccattagtgcaaagaatagagctcgcaccgtagctggtgtctctatctgtagtactatgaccaatagacagtttcatcaaaaattattgaaatcaatagccgccactagaggagctactgtagtaattggaacaagcaaattctatggtggttggcacaacatgttaaaaactgtttatagtgatgtagaaaaccctcaccttatgggttgggattatcctaaatgtgatagagccatgcctaacatgcttagaattatggcctcacttgttcttgctcgcaaacatacaacgtgttgtagcttgtcacaccgtttctatagattagctaatgagtgtgctcaagtattgagtgaaatggtcatgtgtggcggttcactatatgttaaaccaggtggaacctcatcaggagatgccacaactgcttatgctaatagtgtttttaacatttgtcaagctgtcacggccaatgttaatgcacttttatctactgatggtaacaaaattgccgataagtatgtccgcaatttacaacacagactttatgagtgtctctatagaaatagagatgttgacacagactttgtgaatgagttttacgcatatttgcgtaaacatttctcaatgatgatactctctgacgatgctgttgtgtgtttcaatagcacttatgcatctcaaggtctagtggctagcataaagaactttaagtcagttctttattatcaaaacaatgtttttatgtctgaagcaaaatgttggactgagactgaccttactaaaggacctcatgaattttgctctcaacatacaatgctagttaaacagggtgatgattatgtgtaccttccttacccagatccatcaagaatcctaggggccggctgttttgtagatgatatcgtaaaaacagatggtacacttatgattgaacggttcgtgtctttagctatagatgcttacccacttactaaacatcctaatcaggagtatgctgatgtctttcatttgtacttacaatacataagaaagctacatgatgagttaacaggacacatgttagacatgtattctgttatgcttactaatgataacacttcaaggtattgggaacctgagttttatgaggctatgtacacaccgcatacagtcttacaggctgttggggcttgtgttctttgcaattcacagacttcattaagatgtggtgcttgcatacgtagaccattcttatgttgtaaatgctgttacgaccatgtcatatcaacatcacataaattagtcttgtctgttaatccgtatgtttgcaatgctccaggttgtgatgtcacagatgtgactcaactttacttaggaggtatgagctattattgtaaatcacataaaccacccattagttttccattgtgtgctaatggacaagtttttggtttatataaaaatacatgtgttggtagcgataatgttactgactttaatgcaattgcaacatgtgactggacaaatgctggtgattacattttagctaacacctgtactgaaagactcaagctttttgcagcagaaacgctcaaagctactgaggagacatttaaactgtcttatggtattgctactgtacgtgaagtgctgtctgacagagaattacatctttcatgggaagttggtaaacctagaccaccacttaaccgaaattatgtctttactggttatcgtgtaactaaaaacagtaaagtacaaataggagagtacacctttgaaaaaggtgactatggtgatgctgttgtttaccgaggtacaacaacttacaaattaaatgttggtgattattttgtgctgacatcacatacagtaatgccattaagtgcacctacactagtgccacaagagcactatgttagaattactggcttatacccaacactcaatatctcagatgagttttctagcaatgttgcaaattatcaaaaggttggtatgcaaaagtattctacactccagggaccacctggtactggtaagagtcattttgctattggcctagctctctactacccttctgctcgcatagtgtatacagcttgctctcatgccgctgttgatgcactatgtgagaaggcattaaaatatttgcctatagataaatgtagtagaattatacctgcacgtgctcgtgtagagtgttttgataaattcaaagtgaattcaacattagaacagtatgtcttttgtactgtaaatgcattgcctgagacgacagcagatatagttgtctttgatgaaatttcaatggccacaaattatgatttgagtgttgtcaatgccagattacgtgctaagcactatgtgtacattggcgaccctgctcaattacctgcaccacgcacattgctaactaagggcacactagaaccagaatatttcaattcagtgtgtagacttatgaaaactataggtccagacatgttcctcggaacttgtcggcgttgtcctgctgaaattgttgacactgtgagtgctttggtttatgataataagcttaaagcacataaagacaaatcagctcaatgctttaaaatgttttataagggtgttatcacgcatgatgtttcatctgcaattaacaggccacaaataggcgtggtaagagaattccttacacgtaaccctgcttggagaaaagctgtctttatttcaccttataattcacagaatgctgtagcctcaaagattttgggactaccaactcaaactgttgattcatcacagggctcagaatatgactatgtcatattcactcaaaccactgaaacagctcactcttgtaatgtaaacagatttaatgttgctattaccagagcaaaagtaggcatactttgcataatgtctgatagagacctttatgacaagttgcaatttacaagtcttgaaattccacgtaggaatgtggcaactttacaagctgaaaatgtaacaggactctttaaagattgtagtaaggtaatcactgggttacatcctacacaggcacctacacacctcagtgttgacactaaattcaaaactgaaggtttatgtgttgacatacctggcatacctaaggacatgacctatagaagactcatctctatgatgggttttaaaatgaattatcaagttaatggttaccctaacatgtttatcacccgcgaagaagctataagacatgtacgtgcatggattggcttcgatgtcgaggggtgtcatgctactagagaagctgttggtaccaatttacctttacagctaggtttttctacaggtgttaacctagttgctgtacctacaggttatgttgatacacctaataatacagatttttccagagttagtgctaaaccaccgcctggagatcaatttaaacacctcataccacttatgtacaaaggacttccttggaatgtagtgcgtataaagattgtacaaatgttaagtgacacacttaaaaatctctctgacagagtcgtatttgtcttatgggcacatggctttgagttgacatctatgaagtattttgtgaaaataggacctgagcgcacctgttgtctatgtgatagacgtgccacatgcttttccactgcttcagacacttatgcctgttggcatcattctattggatttgattacgtctataatccgtttatgattgatgttcaacaatggggttttacaggtaacctacaaagcaaccatgatctgtattgtcaagtccatggtaatgcacatgtagctagttgtgatgcaatcatgactaggtgtctagctgtccacgagtgctttgttaagcgtgttgactggactattgaatatcctataattggtgatgaactgaagattaatgcggcttgtagaaaggttcaacacatggttgttaaagctgcattattagcagacaaattcccagttcttcacgacattggtaaccctaaagctattaagtgtgtacctcaagctgatgtagaatggaagttctatgatgcacagccttgtagtgacaaagcttataaaatagaagaattattctattcttatgccacacattctgacaaattcacagatggtgtatgcctattttggaattgcaatgtcgatagatatcctgctaattccattgtttgtagatttgacactagagtgctatctaaccttaacttgcctggttgtgatggtggcagtttgtatgtaaataaacatgcattccacacaccagcttttgataaaagtgcttttgttaatttaaaacaattaccatttttctattactctgacagtccatgtgagtctcatggaaaacaagtagtgtcagatatagattatgtaccactaaagtctgctacgtgtataacacgttgcaatttaggtggtgctgtctgtagacatcatgctaatgagtacagattgtatctcgatgcttataacatgatgatctcagctggctttagcttgtgggtttacaaacaatttgatacttataacctctggaacacttttacaagacttcagagtttagaaaatgtggcttttaatgttgtaaataagggacactttgatggacaacagggtgaagtaccagtttctatcattaataacactgtttacacaaaagttgatggtgttgatgtagaattgtttgaaaataaaacaacattacctgttaatgtagcatttgagctttgggctaagcgcaacattaaaccagtaccagaggtgaaaatactcaataatttgggtgtggacattgctgctaatactgtgatctgggactacaaaagagatgctccagcacatatatctactattggtgtttgttctatgactgacatagccaagaaaccaactgaaacgatttgtgcaccactcactgtcttttttgatggtagagttgatggtcaagtagacttatttagaaatgcccgtaatggtgttcttattacagaaggtagtgttaaaggtttacaaccatctgtaggtcccaaacaagctagtcttaatggagtcacattaattggagaagccgtaaaaacacagttcaattattataagaaagttgatggtgttgtccaacaattacctgaaacttactttactcagagtagaaatttacaagaatttaaacccaggagtcaaatggaaattgatttcttagaattagctatggatgaattcattgaacggtataaattagaaggctatgccttcgaacatatcgtttatggagattttagtcatagtcagttaggtggtttacatctactgattggactagctaaacgttttaaggaatcaccttttgaattagaagattttattcctatggacagtacagttaaaaactatttcataacagatgcgcaaacaggttcatctaagtgtgtgtgttctgttattgatttattacttgatgattttgttgaaataataaaatcccaagatttatctgtagtttctaaggttgtcaaagtgactattgactatacagaaatttcatttatgctttggtgtaaagatggccatgtagaaacattttacccaaaattacaatctagtcaagcgtggcaaccgggtgttgctatgcctaatctttacaaaatgcaaagaatgctattagaaaagtgtgaccttcaaaattatggtgatagtgcaacattacctaaaggcataatgatgaatgtcgcaaaatatactcaactgtgtcaatatttaaacacattaacattagctgtaccctataatatgagagttatacattttggtgctggttctgataaaggagttgcaccaggtacagctgttttaagacagtggttgcctacgggtacgctgcttgtcgattcagatcttaatgactttgtctctgatgcagattcaactttgattggtgattgtgcaactgtacatacagctaataaatgggatctcattattagtgatatgtacgaccctaagactaaaaatgttacaaaagaaaatgactctaaagagggttttttcacttacatttgtgggtttatacaacaaaagctagctcttggaggttccgtggctataaagataacagaacattcttggaatgctgatctttataagctcatgggacacttcgcatggtggacagcctttgttactaatgtgaatgcgtcatcatctgaagcatttttaattggatgtaattatcttggcaaaccacgcgaacaaatagatggttatgtcatgcatgcaaattacatattttggaggaatacaaatccaattcagttgtcttcctattctttatttgacatgagtaaatttccccttaaattaaggggtactgctgttatgtctttaaaagaaggtcaaatcaatgatatgattttatctcttcttagtaaaggtagacttataattagagaaaacaacagagttgttatttctagtgatgttcttgttaacaactaaacgaacaatgtttgtttttcttgttttattgccactagtctctagtcagtgtgttaatcttacaaccagaactcaattaccccctgcatacactaattctttcacacgtggtgtttattaccctgacaaagttttcagatcctcagttttacattcaactcaggacttgttcttacctttcttttccaatgttacttggttccatgctatacatgtctctgggaccaatggtactaagaggtttgataaccctgtcctaccatttaatgatggtgtttattttgcttccactgagaagtctaacataataagaggctggatttttggtactactttagattcgaagacccagtccctacttattgttaataacgctactaatgttgttattaaagtctgtgaatttcaattttgtaatgatccatttttgggtgtttattaccacaaaaacaacaaaagttggatggaaagtgagttcagagtttattctagtgcgaataattgcacttttgaatatgtctctcagccttttcttatggaccttgaaggaaaacagggtaatttcaaaaatcttagggaatttgtgtttaagaatattgatggttattttaaaatatattctaagcacacgcctattaatttagtgcgtgatctccctcagggtttttcggctttagaaccattggtagatttgccaataggtattaacatcactaggtttcaaactttacttgctttacatagaagttatttgactcctggtgattcttcttcaggttggacagctggtgctgcagcttattatgtgggttatcttcaacctaggacttttctattaaaatataatgaaaatggaaccattacagatgctgtagactgtgcacttgaccctctctcagaaacaaagtgtacgttgaaatccttcactgtagaaaaaggaatctatcaaacttctaactttagagkccaaccaacagaatctattgttagatttcctaatattacaaacttgtgcccttttggtgaagtttttaacgccaccagatttgcatctgtttatgcttggaacaggaagagaatcagcaactgtgttgctgattattctgtcctatataattccgcatcattttccacttttaagtgttatggagtgtctcctactaaattaaatgatctctgctttactaatgtctatgcagattcatttgtaattagaggtgatgaagtcagacaaatcgctccagggcaaactggaaagattgctgattataattataaattaccagatgattttacaggctgcgttatagcttggaattctaacaatcttgattctaaggttggtggtaattataattacctgtatagattgtttaggaagtctaatctcaaaccttttgagagagatatttcaactgaaatctatcaggccggtagcacaccttgtaatggtgttgaaggttttaattgttactttcctttacaatcatatggtttccaacccactaatggtgttggttaccaaccatacagagtagtagtactttcttttgaacttctacatgcaccagcaactgtttgtggacctaaaaagtctactaatttggttaaaaacaaatgtgtcaatttcaacttcaatggtttaacaggcacaggtgttcttactgagtctaacaaaaagtttctgcctttccaacaatttggcagagacattgctgacactactgatgctgtccgtgatccacagacacttgagattcttgacattacaccatgttcttttggtggtgtcagtgttataacaccaggaacaaatacttctaaccaggttgctgttctttatcagggtgttaactgcacagaagtccctgttgctattcatgcagatcaacttactcctacttggcgtgtttattctacaggttctaatgtttttcaaacacgtgcaggctgtttaataggggctgaacatgtcaacaactcatatgagtgtgacatacccattggtgcaggtatatgcgctagttatcagactcagactaattctcctcggcgggcacgtagtgtagctagtcaatccatcattgcctacactatgtcacttggtgcagaaaattcagttgcttactctrataactctattgccatacccacaaattttactattagtgttaccacagaaattctaccagtgtctatgaccaagacatcagtagattgtacaatgtacatttgtggtgattcaactgaatgcagcaatcttttgttgcaatatggcagtttttgtacacaattaaaccgtgctttaactggaatagctgttgaacaagacaaaaacacccaagaagtttttgcacaagtcaaacaaatttacaaaacaccaccaattaaagattttggtggttttaatttttcacaaatattaccagatccatcaaaaccaagcaagaggtcatttattgaagatctacttttcaacaaagtgacacttgcagatgctggcttcatcaaacaatatggtgattgccttggtgatattgctgctagagacctcatttgtgcacaaaagtttaacggccttactgttttgccacctttgctcacagatgaaatgattgctcaatacacttctgcactgttagcgggtacaatcacttctggttggacctttggtgcaggtgctgcattacaaataccatttgctatgcaaatggcttataggtttaatggtattggagttacacagaatgttctctatgagaaccaaaaattgattgccaaccaatttaatagtgctattggcaaaattcaagactcactttcttccacagcaagtgcacttggaaaacttcaagatgtggtcaaccaaaatgcacaagctttaaacacgcttgttaaacaacttagctccaattttggtgcaatttcaagtgttttaaatgatatcctttcacgtcttgacaaagttgaggctgaagtgcaaattgataggttgatcacaggcagacttcaaagtttgcagacatatgtgactcaacaattaattagagctgcagaaatcagagtttctgctaatcttgctgctactaaaatgtcagagtgtgtacttggacaatcaaaaagagttgatttttgtggaaagggctatcatcttatgtccttccctcagtcagcacctcatggtgtagtcttcttgcatgtgacttatgtccctgcacaagaaaagaacttcacaactgctcctgccatttgtcatgatggaaaagcacactttcctcgtgaaggtgtctttgtttcaaatggcacacactggtttgtaacacaaaggaatttttatgaaccacaaatcattactacagacaacacatttgtgtctggtaactgtgatgttgtaataggaattgtcaacaacacagtttatgatcctttgcaacctgaattagactcattcaaggaggagttagataaatattttaagaatcatacatcaccagatgttgatttaggtgacatctctggcattaatgcttcagttgtaaacattcaaaaagaaattgaccgcctcaatgaggttgccaagaatttaaatgaatctctcatcgatctccaagaacttggaaagtatgagcagtatataaaatggccatggtacatttggctaggttttatagctggcttgattgccatagtaatggtgacaattatgctttgctgtatgaccagttgctgtagttgtctcaagggctgttgttcttgtggatcctgctgcaaatttgatgaagacgactctgagccagtgctcaaaggagtcaaattacattacacataaacgaacttatggatttgtttatgagaatcttcacaattggaactgtaactttgaagcaaggtgaaatcaaggatgctactccttcagattttgttcgcgctactgcaacgataccgatacaagcctcactccctttcggatggcttattgttggcgttgcacttcttgctgtttttcagagcgcttccaaaatcataaccctcaaaaagagatggcaactagcactctccaagggtgttcactttgtttgcaacttgctgttgttgtttgtaacagtttactcacaccttttgctcgttgctgctggccttgaagccccttttctctatctttatgctttagtctacttcttgcagagtataaactttgtaagaataataatgaggctttggctttgctggaaatgccgttccaaaaacccattactttatgatgccaactattttctttgctggcatactaattgttacgactattgtataccttacaatagtgtaacttcttcaattgtcattacttcaggtgatggcacaacaagtcctatttctgaacatgactaccagattggtggttatactgaaaaatgggaatctggagtaaaagactgtgttgtattacacagttacttcacttcagactattaccagctgtactcaactcaattgagtacagacactggtgttgaacatgttaccttcttcatctacaataaaattgttgatgagcctgaagaacatgtccaaattcacacaatcgacggttcatccggagttgttaatccagtaatggaaccaatttatgatgaaccgacgacgactactagcgtgcctttgtaagcacaagctgatgagtacgaacttatgtactcattcgtttcggaagagmcaggtacgttaatagttaatagcgtacttctttttcttgctttcgtggtattcttgctagttacactagccatccttactgcgcttcgattgtgtgcgtactgctgcaatattgttaacgtgagtcttgtaaaaccttctttttacgtttactctcgtgttaaaaatctgaattcttctagagttcctgatcttctggtctaaacgaactaaatattatattagtttttctgtttggaactttaattttagccatggcagattccaacggtactattaccgttgaagagcttaaaaagctccttgaacaatggaacctagtaataggtttcctattccttacatggatttgtcttctacaatttgcctatgccaacaggaataggtttttgtatataattaagttaattttcctctggctgttatggccagtaactttagcttgttttgtgcttgctgctgtttacagaataaattggatcaccggtggaattgctatcgcaatggcttgtcttgtaggcttgatgtggctcagctacttcattgcttctttcagactgtttgcgcgtacgcgttccatgtggtcattcaatccagaaactaacattcttctcaacgtgccactccatggcactattctgaccagaccgcttctagaaagtgaactcgtaatcggagctgtgatccttcgtggacatcttcgtattgctggacaccatctaggacgctgtgacatcaaggacctgcctaaagaaatcactgttgctacatcacgaatgctttcttattacaaattgggagcttcgcagcgtgtagcaggtgactcaggttttgctgcatacagtcgctacaggattggcaactataaattaaacacagaccattccagtagcagtgacaatattgctttgcttgtacagtaagtgacaacagatgtttcatctcgttgactttcaggttactatagcagagatattactaattattatgaggacttttaaagtttccatttggaatcttgattacatcataaacctcataattaaaaatttatctaagtcactaactgagaataaatattctcaattagatgaagagcaaccaatggagattgattaaacgaacatgaaaattattcttttcttggcactgataacactcgctacttgtgagctttatcactaccaagagtgtgttagaggtacaacagtacttttaaaagaaccttgctcttctggaacatacgagggcaattcaccatttcatcctctagctgataacaaatttgcactgacttgctttagcactcaatttgcttttgcttgtcctgacggcgtaaaacacgtctatcagttacgtgccagatcagtttcacctaaactgttcatcagacaagaggaagttcaagaactttactctccaatttttcttattgttgcggcaatagtgtttataacactttgcttcacactcaaaagaaagacagaatgattgaactttcattaattgacttctatttgtgctttttagcctttctgctattccttgttttaattatgcttattatcttttggttctcacttgaactgcaagatcataatgaaacttgtcacgcctaaacgaacatgaaatttcttgttttcttaggaatcatcacaactgtagctgcatttcaccaagaatgtagtttacagtcatgtactcaacatcaaccatatgtagttgatgacccgtgtcctattcacttctattctaaatggtatattagagtaggagctagaaaatcagcacctttaattgaattgtgcgtggatgaggctggttctaaatcacccattcagtacatcgatatcggtaattatacagtttcctgtttaccttttacaattaattgccaggaacctaaattgggtagtcttgtagtgcgttgttcgttctatgaagactttttagagtatcatgacgttcgtgttgttttagatttcatctaaacgaacaaactaaaatgtctgataatggaccccaaaatcagcgaaatgcaccccgcattacgtttggtggaccctcagattcaactggcagtaaccagaatggagaacgcagtggggcgcgatcaaaacaacgtcggccccaaggtttacccaataatactgcgtcttggttcaccgctctcactcaacatggcaaggaagaccttaaattccctcgaggacaaggcgttccaattaacaccaatagcagtccagatgaccaaattggctactaccgaagagctaccagacgaattcgtggtggtgacggtaaaatgaaagatctcagtccaagatggtatttctactacctaggaactgggccagaagctggacttccctatggtgctaacaaagacggcatcatatgggttgcaactgagggagccttgaatacaccaaaagatcacattggcacccgcaatcctgctaacaatgctgcaatcgtgctacaacttcctcaaggaacaacattgccaaaaggcttctacgcagaagggagcagaggcggcagtcaagcctcttctcgttcctcatcacgtagtcgcaacagttcaagaaattcaactccaggcagcagtaaacgaacttctcctgctagaatggctggcaatggcggtgatgctgctcttgctttgctgctgcttgacagattgaaccagcttgagagcaaaatgtctggtaaaggccaacaacaacaaggccaaactgtcactaagaaatctgctgctgaggcttctaagaagcctcggcaaaaacgtactgccactaaagcatacaatgtaacacaagctttcggcagacgtggtccagaacaaacccaaggaaattttggggaccaggaactaatcagacaaggaactgattacaaacattggccgcaaattgcacaatttgcccccagcgcttcagcgttcttcggaatgtcgcgcattggcatggaagtcacaccttcgggaacgtggttgacctacacaggtgccatcaaattggatgacaaagatccaaatttcaaagatcaagtcattttgctgaataagcatattgacgcatacaaaacattcccaccaacagagcctaaaaaggacaaaaagaagaaggctgatgaaactcaagccttaccgcagagacagaagaaacagcaaactgtgactcttcttcctgctgcagatttggatgatttctccaaacaattgcaacaatccatgagcagtgctgactcaactcaggcctaaactcatgcagaccacacaaggcagatgggctatataaacgttttcgcttttccgtttacgatatatagtctactcttgtgcagaatgaattctcgtaactacatagcacaagtagatgtagttaactttaatctcacatagcaatctttaatcagtgtgtaacattagggaggacttgaaagagccaccacattttcaccgaggccacgcggagtacgatcgagtgtacagtgaacaatgctagggagagctgcctatatggaagagccctaatgtgtaaaattaattttagtagtgctatccccatgtgattttaatagcttcttaggagnatgacannnnnnnnnnnnnn

SEQ ID NO: 16 - protein, 4405 aa, SARS-CoV2 [sequence omitted]

SEQ ID NO: 17 - protein, 1273 aa, SARS-CoV2
  misc_feature (320)..(320): Xaa can be any naturally occurring amino acid
  misc_feature (709)..(709): Xaa can be any naturally occurring amino acid
MFVFLVLLPLVSSQCVNLTTRTQLPPAYTNSFTRGVYYPDKVFRSSVLHSTQDLFLPFFSNVTWFHAIHVSGTNGTKRFDNPVLPFNDGVYFASTEKSNIIRGWIFGTTLDSKTQSLLIVNNATNVVIKVCEFQFCNDPFLGVYYHKNNKSWMESEFRVYSSANNCTFEYVSQPFLMDLEGKQGNFKNLREFVFKNIDGYFKIYSKHTPINLVRDLPQGFSALEPLVDLPIGINITRFQTLLALHRSYLTPGDSSSGWTAGAAAYYVGYLQPRTFLLKYNENGTITDAVDCALDPLSETKCTLKSFTVEKGIYQTSNFRXQPTESIVRFPNITNLCPFGEVFNATRFASVYAWNRKRISNCVADYSVLYNSASFSTFKCYGVSPTKLNDLCFTNVYADSFVIRGDEVRQIAPGQTGKIADYNYKLPDDFTGCVIAWNSNNLDSKVGGNYNYLYRLFRKSNLKPFERDISTEIYQAGSTPCNGVEGFNCYFPLQSYGFQPTNGVGYQPYRVVVLSFELLHAPATVCGPKKSTNLVKNKCVNFNFNGLTGTGVLTESNKKFLPFQQFGRDIADTTDAVRDPQTLEILDITPCSFGGVSVITPGTNTSNQVAVLYQGVNCTEVPVAIHADQLTPTWRVYSTGSNVFQTRAGCLIGAEHVNNSYECDIPIGAGICASYQTQTNSPRRARSVASQSIIAYTMSLGAENSVAYSXNSIAIPTNFTISVTTEILPVSMTKTSVDCTMYICGDSTECSNLLLQYGSFCTQLNRALTGIAVEQDKNTQEVFAQVKQIYKTPPIKDFGGFNFSQILPDPSKPSKRSFIEDLLFNKVTLADAGFIKQYGDCLGDIAARDLICAQKFNGLTVLPPLLTDEMIAQYTSALLAGTITSGWTFGAGAALQIPFAMQMAYRFNGIGVTQNVLYENQKLIANQFNSAIGKIQDSLSSTASALGKLQDVVNQNAQALNTLVKQLSSNFGAISSVLNDILSRLDKVEAEVQIDRLITGRLQSLQTYVTQQLIRAAEIRVSANLAATKMSECVLGQSKRVDFCGKGYHLMSFPQSAPHGVVFLHVTYVPAQEKNFTTAPAICHDGKAHFPREGVFVSNGTHWFVTQRNFYEPQIITTDNTFVSGNCDVVIGIVNNTVYDPLQPELDSFKEELDKYFKNHTSPDVDLGDISGINASVVNIQKEIDRLNEVAKNLNESLIDLQELGKYEQYIKWPWYIWLGFIAGLIAIVMVTIMLCCMTSCCSCLKGCCSCGSCCKFDEDDSEPVLKGVKLHYT

SEQ ID NO: 18 - DNA, 29897 bp, SARS-CoV2
  misc_feature (11288)..(11293): n is a, c, g, or t
  misc_feature (22278)..(22283): n is a, c, g, or t
  misc_feature (29836)..(29864): n is a, c, g, or t
attaaaggtttataccttcccaggtaacaaaccaaccaactttcgatctcttgtagatctgttctctaaacgaactttaaaatctgtgtggctgtcactcggctgcatgcttagtgcactcacgcagtataattaataactaattactgtcgttgacaggacacgagtaactcttctatcttctgcaggctgcttacggtttcgtccgtgttgcagccgatcatcagcacatctaggttttgtccgggtgtgaccgaaaggtaagatggagagccttgtccctggtttcaacgagaaaacacacgtccaactcagtttgcctgttttacaggttcgcgacgtgctcgtacgtggctttggagactccgtggaggaggtcttatcagaggcacgtcaacatcttaaagatggcacttgtggcttagtagaagttgaaaaaggcgttttgcctcaacttgaacagccctatgtgttcatcaaacgttcggatgctcgaactgcacctcatggtcatgttatggttgagctggtagcagaactcgaaggcattcagtacggtcgtagtggtgagacacttggtgtccttgtccctcatgtgggcgaaataccagtggcttaccgcaaggttcttcttcgtaagaacggtaataaaggagctggtggccatagttacggcgccgatctaaagtcatttgacttaggcgacgagcttggcactgatccttatgaagattttcaagaaaactggaacactaaacatagcagtggtgttacccgtgaactcatgcgtgagcttaacggaggggcatacactcgctatgtcgataacaacttctgtggccctgatggctaccctcttgagtgcattaaagaccttctagcacgtgctggtaaagcttcatgcactttgtccgaacaactggactttattgacactaagaggggtgtatactgctgccgtgaacatgagcatgaaattgcttggtacacggaacgttctgaaaagagctatgaattgcagacaccttttgaaattaaattggcaaagaaatttgacatcttcaatggggaatgtccaaattttgtatttcccttaaattccataatcaagactattcaaccaagggttgaaaagaaaaagcttgatggctttatgggtagaattcgatctgtctatccagttgcgtcaccaaatgaatgcaaccaaatgtgcctttcaactctcatgaagtgtgatcattgtggtgaaacttcatggcagacgggcgattttgttaaagccacttgcgaattttgtggcactgagaatttgactaaagaaggtgccactacttgtggttacttaccccaaaatgctgttgttaaaatttattgtccagcatgtcacaattcagaagtaggacctgagcatagtcttgccgaataccataatgaatctggcttgaaaaccattcttcgtaagggtggtcgcactattgcctttggaggctgtgtgttctcttatgttggttgccataacaagtgtgcctattgggttccacgtgctagcgctaacataggttgtaaccatacaggtgttgttggagaaggttccgaaggtcttaatgacaaccttcttgaaatactccaaaaagagaaagtcaacatcaatattgttggtgactttaaacttaatgaagagatcgccattattttggcatctttttctgcttccacaagtgcttttgtggaaactgtgaaaggtttggattataaagcattcaaacaaattgttgaatcctgtggtaattttaaagttacaaaaggaaaagctaaaaaaggtgcctggaatattggtgaacagaaatcaatactgagtcctctttatgcatttgcatcagaggctgctcgtgttgtacgatcaattttctcccgcactcttgaaactgctcaaaattctgtgcgtgttttacagaaggccgctataacaatactagatggaatttcacagtattcactgagactcattgatgctatgatgttcacatctgatttggctactaacaatctagttgtaatggcctacattacaggtggtgttgttcagttgacttcgcagtggctaactaacatctttggcactgtttatgaaaaactcaaacccgtccttgattggcttgaagagaagtttaaggaaggtgtagagtttcttagagacggttgggaaattgttaaatttatctcaacctgtgcttgtgaaattgtcggtggacaaattgtcacctgtgcaaaggaaattaaggagagtgttcagacattctttaagcttgtaaataaatttttggctttgtgtgctgactctatcattattggtggagctaaacttaaagccttgaatttaggtgaaacatttgtcacgcactcaaagggattgtacagaaagtgtgttaaatccagagaagaaactggcctactcatgcctctaaaagccccaaaagaaattatcttcttagagggagaaacacttcccacagaagtgttaacagaggaagttgtcttgaaaactggtgatttacaaccattagaacaacctactagtgaagctgttgaagctccattggttggtacaccagtttgtattaacgggcttatgttgctcgaaatcaaagacacagaaaagtactgtgcccttgcacctaatatgatggtaactaacaataccttcacactcaaaggcggtgcaccaacaaaggttacttttggtgatgacactgtgatagaagtgcaaggttacaagagtgtgaatatcacttttgaacttgatgaaaggattgataaagtacttaatgagaagtgctctgcctatacagttgaactcggtacagaagtaaatgagttcgcctgtgttgtggcagatgctgtcataaaaactttgcaaccagtatctgaattacttacaccactgggcattgatttagatgagtggagtatggctacatactacttatttgatgagtctggtgagtttaaattggcttcacatatgtattgttctttttaccctccagatgaggatgaagaagaaggtgattgtgaagaagaagagtttgagccatcaactcaatatgagtatggtactgaagatgattaccaaggtaaacctttggaatttggtgccacttctgctgctcttcaacctgaagaagagcaagaagaagattggttagatgatgatagtcaacaaactgttggtcaacaagacggcagtgaggacaatcagacaactactattcaaacaattgttgaggttcaacctcaattagagatggaacttacaccagttgttcagactattgaagtgaatagttttagtggttatttaaaacttactgacaatgtatacattaaaaatgcagacattgtggaagaagctaaaaaggtaaaaccaacagtggttgttaatgcagccaatgtttaccttaaacatggaggaggtgttgcaggagccttaaataaggctactaacaatgccatgcaagttgaatctgatgattacatagctactaatggaccacttaaagtgggtggtagttgtgttttaagcggacacaatcttgctaaacactgtcttcatgttgtcggcccaaatgttaacaaaggtgaagacattcaacttcttaagagtgcttatgaaaattttaatcagcacgaagttctacttgcaccattattatcagctggtatttttggtgctgaccctatacattctttaagagtttgtgtagatactgttcgcacaaatgtctacttagctgtctttgataaaaatctctatgacaaacttgtttcaagctttttggaaatgaagagtgaaaagcaagttgaacaaaagatcgctgagattcctaaagaggaagttaagccatttataactgaaagtaaaccttcagttgaacagagaaaacaagatgataagaaaatcaaagcttgtgttgaagaagttacaacaactctggaagaaactaagttcctcacagaaaacttgttactttatattgacattaatggcaatcttcatccagattctgccactcttgttagtgacattgacatcactttcttaaagaaagatgctccatatatagtgggtgatgttgttcaagagggtgttttaactgctgtggttatacctactaaaaaggctggtggcactactgaaatgttagcgaaagctttgagaaaagtgccaacagacaattatataaccacttacccgggtcagggtttaaatggttacactgtagaggaggcaaagacagtgcttaaaaagtgtaaaagtgccttttacattctaccatctattatctctaatgagaagcaagaaattcttggaactgtttcttggaatttgcgagaaatgcttgcacatgcagaagaaacacgcaaattaatgcctgtctgtgtggaaactaaagccatagtttcaactatacagcgtaaatataagggtattaaaatacaagagggtgtggttgattatggtgctagattttacttttacaccagtaaaacaactgtagcgtcacttatcaacacacttaacgatctaaatgaaactcttgttacaatgccacttggctatgtaacacatggcttaaatttggaagaagctgctcggtatatgagatctctcaaagtgccagctacagtttctgtttcttcacctgatgctgttacagcgtataatggttatcttacttcttcttctaaaacacctgaagaacattttattgaaaccatctcacttgctggttcctataaagattggtcctattctggacaatctacacaactaggtatagaatttcttaagagaggtgataaaagtgtatattacactagtaatcctaccacattccacctagatggtgaagttatcacctttgacaatcttaagacacttctttctttgagagaagtgaggactattaaggtgtttacaacagtagacaacattaacctccacacgcaagttgtggacatgtcaatgacatatggacaacagtttggtccaacttatttggatggagctgatgttactaaaataaaacctcataattcacatgaaggtaaaacattttatgttttacctaatgatgacactctacgtgttgaggcttttgagtactaccacacaactgatcctagttttctgggtaggtacatgtcagcattaaatcacactaaaaattggaaatacccacaagttaatggtttaacttctattaaatgggcagataacaactgttatcttgccactgcattgttaacactccaacaaatagagttgaagtttaatccacctgctctacaagatgcttattacagagcaagggctggtgaagctgctaacttttgtgcacttatcttagcctactgtaataagacagtaggtgagttaggtgatgttagagaaacaatgagttacttgtttcaacatgccaatttagattcttgcaaaagagtcttgaacgtggtgtgtaaaacttgtggacaacagcagacaacccttaagggtgtagaagctgttatgtacatgggcacactttcttatgaacaatttaagaaaggtgttcagataccttgtacgtgtggtaaacaagctacaaaatatctagtacaacaggagtcaccttttgttatgatgtcagcaccacctgctcagtatgaacttaagcatggtacatttacttgtgctagtgagtacactggtaattaccagtgtggtcactataaacatataacttctaaagaaactttgtattgcatagacggtgctttacttacaaagtcctcagaatacaaaggtcctattacggatgttttctacaaagaaaacagttacacaacaaccataaaaccagttacttataaattggatggtgttgtttgtacagaaattgaccctaagttggacaattattataagaaagacaattcttatttcacagagcaaccaattgatcttgtaccaaaccaaccatatccaaacgcaagcttcgataattttaagtttgtatgtgataatatcaaatttgctgatgatttaaaccagttaactggttacaagaaacctgcttcaagagagcttaaagttacatttttccctgacttaaatggtgatgtggtggctattgattataaacactacacaccctcttttaagaaaggagctaaattgttacataaacctattgtttggcatgttaacaatgcaactaataaagccacgtataaaccaaatacctggtgtatacgttgtctttggagcacaaaaccagttgaaacatcaaattcgtttgatgtactgaagtcagaggacgcgcagggaatggataatcttgcctgcgaagatctaaaaccagtctctgaagaagtagtggaaaatcctaccatacagaaagacgttcttgagtgtaatgtgaaaactaccgaagttgtaggagacattatacttaaaccagcaaataatagtttaaaaattacagaagaggttggccacacagatctaatggctgcttatgtagacaattctagtcttactattaagaaacctaatgaattatctagagtattaggtttgaaaacccttgctactcatggtttagctgctgttaatagtgtcccttgggatactatagctaattatgctaagccttttcttaacaaagttgttagtacaactactaacatagttacacggtgtttaaaccgtgtttgtactaattatatgccttatttctttactttattgctacaattgtgtacttttactagaagtacaaattctagaattaaagcatctatgccgactactatagcaaagaatactgttaagagtgtcggtaaattttgtctagaggcttcatttaattatttgaagtcacctaatttttctaaactgataaatattataatttggtttttactattaagtgtttgcctaggttctttaatmtactcaaccgctgctttaggtgttttaatgtctaatttaggcatgccttcttactgtactggttacagagaaggctatttgaactctactaatgtcactattgcaacctactgtactggttctataccttgtagtgtttgtcttagtggtttagattctttagacacctatccttctttagaaactatacaaattaccatttcatcttttaaatgggatttaactgcttttggcttagttgcagagtggtttttggcatatattcttttcactaggtttttctatgtacttggattggctgcaatcatgcaattgtttttcagctattttgcagtacattttattagtaattcttggcttatgtggttaataattaatcttgtacaaatggccccgatttcagctatggttagaatgtacatcttctttgcatcattttattatgtatggaaaagttatgtgcatgttgtagacggttgtaattcatcaacttgtatgatgtgttacaaacgtaatagagcaacaagagtcgaatgtacaactattgttaatggtgttagaaggtccttttatgtctatgctaatggaggtaaaggcttttgcaaactacacaattggaattgtgttaattgtgatacattctgtgctggtagtacatttattagtgatgaagttgcgagagacttgtcactacagtttaaaagaccaataaatcctactgaccagtcttcttacatcgttgatagtgttacagtgaagaatggttccatccatctttactttgataaagctggtcaaaagacttatgaaagacattctctctctcattttgttaacttagacaacctgagagctaataacactaaaggttcattgcctattaatgttatagtttttgatggtaaatcaaaatgtgaagaatcatctgcaaaatcagcgtctgtttactacagtcagcttatgtgtcaacctatactgttactagatcaggcattagtgtctgatgttggtgatagtgcggaagttgcagttaaaatgtttgatgcttacgttaatacgttttcatcaacttttaacgtaccaatggaaaaactcaaaacactagttgcaactgcagaagctgaacttgcaaagaatgtgtccttagacaatgtcttatctacttttatttcagcagctcggcaagggtttgttgattcagatgtagaaactaaagatgttgttgaatgtcttaaattgtcacatcaatctgacatagaagttactggcgatagttgtaataactatatgctcacctataacaaagttgaaaacatgacaccccgtgaccttggtgcttgtattgactgtagtgcgcgtcatattaatgcgcaggtagcaaaaagtcacaacattgctttgatatggaacgttaaagatttcatgtcattgtctgaacaactacgaaaacaaatacgtagtgctgctaaaaagaataacttaccttttaagttgacatgtgcaactactagacaagttgttaatgttgtaacaacaaagatagcacttaagggtggtaaaattgttaataattggttgaagcagttaattaaagttacacttgtgttcctttttgttgctgctattttctatttaataacacctgttcatgtcatgtctaaacatactgacttttcaagtgaaatcataggatacaaggctattgatggtggtgtcactcgtgacatagcatctacagatacttgttttgctaacaaacatgctgattttgacacatggtttagccagcgtggtggtagttatactaatgacaaagcttgcccattgattgctgcagtcataacaagagaagtgggttttgtcgtgcctggtttgcctggcacgatattacgcacaactaatggtgactttttgcatttcttacctagagtttttagtgcagttggtaacatctgttacacaccatcaaaacttatagagtacactgactttgcaacatcagcttgtgttttggctgctgaatgtacaatttttaaagatgcttctggtaagccagtaccatattgttatgataccaatgtactagaaggttctgttgcttatgaaagtttacgccctgacacacgttatgtgctcatggatggctctattattcaatttcctaacacctaccttgaaggttctgttagagtggtaacaacttttgattctgagtactgtaggcacggcacttgtgaaagatcagaagctggtgtttgtgtatctactagtggtagatgggtacttaacaatgattattacagatctttaccaggagttttctgtggtgtagatgctgtaaatttatttactaatatgtttacaccactaattcaacctattggtgctttggacatatcagcatctatagtagctggtggtattgtagctatcgtagtaacatgccttgcctactattttatgaggtttagaagagcttttggtgaatacagtcatgtagttgcctttaatactttactattccttatgtcattcactgtactctgtttaacaccagtttactcattcttacctggtgtttattctgttatttacttgtacttgacattttatcttactaatgatgtttcttttttagcacatattcagtggatggttatgttcacacctttagtacctttctggataacaattgcttatatcatttgtatttccacaaagcatttctattggttctttagtaattacctaaagagacgtgtagtctttaatggtgtttcctttagtacttttgaagaagctgcgctgtgcacctttttgttaaataaagaaatgtatctaaagttgcgtagtgatgtgctattacctcttacgcaatataatagatacttagctctttataataagtacaagtattttagtggagcaatggatacaactagctacagagaagctgcttgttgtcatctcgcaaaggctctcaatgacttcagtaactcaggttctgatgttctttaccaaccaccacaaacctctatcacctcagctgttttgcagagtggttttagaaaaatggcattcccatctggtaaagttgagggttgtatggtacaagtaacttgtggtacaactacacttaacggtctttggcttgatgacgtagtttactgtccaagacatgtgatctgcacctctgaagacatgcttaaccctaattatgaagatttactcattcgtaagtctaatcataatttcttggtacaggctggtaatgttcaactcagggttattggacattctatgcaaaattgtgtacttaagcttagggttgatacagccaatcctaagacacctaagtataagtttgttcgcattcaaccaggacagactttttcagtgttagcttgttacaatggttcaccatctggtgtttaccaatgtgctatgaggcccaatttcactattaagggttcattccttaatggttcatgtggtagtgttggttttaacatagattatgactgtgtctctttttkttacatgcaccatatggaattaccaactggagttcatgctggcacagacttagaaggtaacttttatggaccttttgttgacaggcaaacagcacaagcagctggtacggacacaactattacagttaatgttttagcttggttgtacgctgctgttataaatggagacaggtggtttctcaatcgatttaccacaactcttaatgactttaaccttgtggctatgaagtacaattatgaacytctaacacaagaccatgttgacatactaggacctctttctgctcaaactggaattgccgttttagatatgtgtgcttcattaaaagaattactgcaaaatggtatgaatggacgtaccatattgggtagtgctttattagaagatgaatttacaccttttgatgttgttagacaatgctcaggtgttactttccaaagtgcagtgaaaagaacaatcaagggtacacaccactggttgttactcacaattttgacttcacttttagttttagtccagagtactcaatggtctttgttcttttttttgtatgaaaatgcctttttaccttttgctatgggtattattgctatgtctgcttttgcaatgatgtttgtcaaacataagcatgcatttctctgtttgtttttgttaccttctcttgccactgtagcttattttaatatggtctatatgcctgctagttgggtgatgcgtattatgacatggttggatatggttgatactagtttgnnnnnnaagctaaaagactgtgttatgtatgcatcagctgtagtgttactaatccttatgacagcaagaactgtgtatgatgatggtgctaggagagtgtggacacttatgaatgtcttgacactcgtttataaagtttattatggtaatgctttagatcaagccatttccatgtgggctcttataatctctgttacttctaactactcaggtgtagttacaactgtcatgtttttggccagaggtattgtttttatgtgtgttgagtattgccctattttcttcataactggtaatacacttcagtgtataatgctagtttattgtttcttaggctatttttgtacttgttactttggcctcttttgtttactcaaccgctactttagactgactcttggtgtttatgattacttagtttctacacaggagtttagatatatgaattcacagggactaytcccacccaagaatagcatagatgccttcaaactcaacattaaattgttgggtgttggtggcaaaccttgtatcaaagtagccactgtacagtctaaaatgtcagatgtaaagtgcacatcagtagtcttactctcagttttgcaacaactcagagtagaatcatcatctaaattgtgggctcaatgtgtccagttacacaatgacattctcttagctaaagatactactgaagcctttgaaaaaatggtttcactactttctgttttgctttccatgcagggtgctgtagacataaacaagctttgtgaagaaatgctggacaacagggcaaccttacaagctatagcctcagagtttagttcccttccatcatatgcagcttttgctactgctcaagaagcttatgagcaggctgttgctaatggtgattctgaagttgttcttaaaaagttgaagaagtctttgaatgtggctaaatctgaatttgaccgtgatgcagccatgcaacgtaagttggaaaagatggctgatcaagctatgacccaaatgtataaacaggctagatctgaggacaagagggcaaaagttactagtgctatgcagacaatgcttttcactatgcttagaaagttggataatgatgcactcaacaacattatcaacaatgcaagagatggttgtgttcccttgaacataatacctcttacaacagcagccaaactaatggttgtcataccagactataacacatataaaaatacgtgtgatggtacaacatttacttatgcatcagcattgtgggaaatccaacaggttgtagatgcagatagtaaaattgttcaacttagtgaaattagtatggacaattcacctaatttagcatggcctcttattgtaacagctttaagggccaattctgctgtcaaattacagaataatgagcttagtcctgttgcactacgacagatgtcttgtgctgccggtactacacaaactgcttgcactgatgacaatgcgttagcttactacaacacaacaaagggaggtaggtttgtacttgcactgttatccgatttacaggatttgaaatgggctagattccctaagagtgatggaactggtactatctatacagaactggaaccaccttgtaggtttgttacagacacacctaaaggtcctaaagtgaagtatttatactttattaaaggattaaacaacctaaatagaggtatggtacttggtagtttagctgccacagtacgtctacaagctggtaatgcaacagaagtgcctgccaattcaactgtattatctttctgtgcttttgctgtagatgctgctaaagcttacaaagattatctagctagtgggggacaaccaatcactaattgtgttaagatgttgtgtacacacactggtactggtcaggcaataacagttacaccggaagccaatatggatcaagaatcctttggtggtgcatcgtgttgtctgtactgccgttgccacatagatcatccaaatcctaaaggattttgtgacttaaaaggtaagtatgtacaaatacctacaacttgtgctaatgaccctgtgggttttacacttaaaaacacagtctgtaccgtctgcggtatgtggaaaggttatggctgtagttgtgatcaactccgcgaacccatgcttcagtcagctgatgcacaatcgtttttaaacgggtttgcggtgtaagtgcagcccgtcttacaccgtgcggcacaggcactagtactgatgtcgtatacagggcttttgacatctacaatgataaagtagctggttttgctaaattcctaaaaactaattgttgtcgcttccaagaaaaggacgaagatgacaatttaattgattcttactttgtagttaagagacacactttctctaactaccaacatgaagaaacaatttataatttacttaaggattgtccagctgttgctaaacatgacttctttaagtttagaatagacggtgacatggtaccacatatatcacgtcaacgtcttactaaatacacaatggcagacctcgtctatgctttaaggcattttgatgaaggtaattgtgacacattaaaagaaatacttgtcacatacaattgttgtgatgatgattatttcaataaaaaggactggtatgattttgtagaaaacccagatatattacgcgtatacgccaacttaggtgaacgtgtacgccaagctttgttaaaaacagtacaattctgtgatgccatgcgaaatgctggtattgttggtgtactgacattagataatcaagatctcaatggtaactggtatgatttcggtgatttcatacaaaccacgccaggtagtggagttcctgttgtagattcttattattcattgttaatgcctatattaaccttgaccagggctttaactgcagagtcacatgttgacactgacttaacaaagccttacattaagtgggatttgttaaaatatgacttcacggaagagaggttaaaactctttgaccgttattttaaatattgggatcagacataccacccaaattgtgttaactgtttggatgacagatgcattctgcattgtgcaaactttaatgttttattctctacagtgttcccacttacaagttttggaccactagtgagaaaaatatttgttgatggtgttccatttgtagtttcaactggataccacttcagagagctaggtgttgtacataatcaggatgtaaacttacatagctctagacttagttttaaggaattacttgtgtatgctgctgaccctgctatgcacgctgcttctggtaatctattactagataaacgcactacgtgcttttcagtagctgcacttactaacaatgttgcttttcaaactgtcaaacccggtaattttaacaaagacttctatgactttgctgtgtctaagggtttctttaaggaaggaagttctgttgaattaaaacacttcttctttgctcaggatggtaatgctgctatcagcgattatgactactatcgttataatctaccaacaatgtgtgatatcagacaactactatttgtagttgaagttgttgataagtactttgattgttacgatggtggctgtattaatgctaaccaagtcatcgtcaacaacctagacaaatcagctggttttccatttaataaatggggtaaggctagactttattatgattcaatgagttatgaggatcaagatgcacttttcgcatatacaaaacgtaatgtcatccctactataactcaaatgaatcttaagtatgccattagtgcaaagaatagagctcgcaccgtagctggtgtctctatctgtagtactatgaccaatagacagtttcatcaaaaattattgaaatcaatagccgccactagaggagctactgtagtaattggaacaagcaaattctatggtggttggcacaacatgttaaaaactgtttatagtgatgtagaaaaccctcaccttatgggttgggattatcctaaatgtgatagagccatgcctaacatgcttagaattatggcctcacttgttcttgctcgcaaacatacaacgtgttgtagcttgtcacaccgtttctatagattagctaatgagtgtgctcaagtattgagtgaaatggtcatgtgtggcggttcactatatgttaaaccaggtggaacctcatcaggagatgccacaactgcttatgctaatagtgtttttaacatttgtcaagctgtcacggccaatgttaatgcacttttatctactgatggtaacaaaattgccgataagtatgtccgcaatttacaacacagactttatgagtgtctctatagaaatagagatgttgacacagactttgtgaatgagttttacgcatatttgcgtaaacatttctcaatgatgatactctctgacgatgctgttgtgtgtttcaatagcacttatgcatctcaaggtctagtggctagcataaagaactttaagtcagttctttattatcaaaacaatgtttttatgtctgaagcaaaatgttggactgagactgaccttactaaaggacctcatgaattttgctctcaacatacaatgctagttaaacagggtgatgattatgtgtaccttccttacccagatccatcaagaatcctaggggccggctgttttgtagatgatatcgtaaaaacagatggtacacttatgattgaacggttcgtgtctttagctatagatgcttacccacttactaaacatcctaatcaggagtatgctgatgtctttcatttgtacttacaatacataagaaagctacatgatgagttaacaggacacatgttagacatgtattctgttatgcttactaatgataacacttcaaggtattgggaacctgagttttatgaggctatgtacacaccgcatacagtcttacaggctgttggggcttgtgttctttgcaattcacagacttcattaagatgtggtgcttgcatacgtagaccattcttatgttgtaaatgctgttacgaccatgtcatatcaacatcacataaattagtcttgtctgttaatccgtatgtttgcaatgcttcaggttgtgatgtcacagatgtgactcaactttacttaggaggtatgagctattattgtaaatcacataaaccacccattagttttccattgtgtgctaatggacaagtttttggtttatataaaaatacatgtgttggtagcgataatgttactgactttaatgcaattgcaacatgtgactggacaaatgctggtgattacattttagctaacacctgtactgaaagactcaagctttttgcagcagaaacgctcaaagctactgaggagacatttaaactgtcttatggtattgctactgtacgtgaagtgctgtctgacagagaattacatctttcatgggaagttggtaaacctagaccaccacttaaccgaaattatgtctttactggttatcgtgtaactaaaaacagtaaagtacaaataggagagtacacctttgaaaaaggtgactatggtgatgctgttgtttaccgaggtacaacaacttacaaattaaatgttggtgattattttgtgctgacatcacatacagtaatgccattaagtgcacctacactagtgccacaagagcactatgttagaattactggcttatacccaacactcaatatctcagatgagttttctagcaatgttgcaaattatcaaaaggttggtatgcaaaagtattctacactccagggaccacctggtactggtaagagtcattttgctattggcctagctctctactacccttctgctcgcatagtgtatacagcttgctctcatgccgctgttgatgcactatgtgagaaggcattaaaatatttgcctatagataaatgtagtagaattatacctgcacgtgctcgtgtagagtgttttgataaattcaaagtgaattcaacattagaacagtatgtcttttgtactgtaaatgcattgcctgagacgacagcagatatagttgtctttgatgaaatttcaatggccacaaattatgatttgagtgttgtcaatgccagattacgtgctaagcactatgtgtacattggcgaccctgctcaattacctgcaccacgcacattgctaactaagggcacactagaaccagaatatttcaattcagtgtgtagacttatgaaaactataggtccagacatgttcctcggaacttgtcggcgttgtcctgctgaaattgttgacactgtgagtgctttggtttatgataataagcttaaagcacataaagacaaatcagctcaatgctttaaaatgttttataagggtgttatcacgcatgatgtttcatctgcaattaacaggccacaaataggcgtggtaagagaattccttacacgtaaccctgcttggagaaaagctgtctttatttcaccttataattcacagaatgctgtagcctcaaagattttgggactaccaactcaaactgttgattcatcacagggctcagaatatgactatgtcatattcactcaaaccactgaaacagctcactcttgtaatgtaaacagatttaatgttgctattaccagagcaaaagtaggcatactttgcataatgtctgatagagacctttatgacaagttgcaatttacaagtcttgaaattccacgtaggaatgtggcaactttacaagctgaaaatgtaacaggactctttaaagattgtagtaaggtaatcactgggttacatcctacacaggcacctacacacctcagtgttgacactaaattcaaaactgaaggtttatgtgttgacatacctggcatacctaaggacatgacctatagaagactcatctctatgatgggttttaaaatgaattatcaagttaatggttaccctaacatgtttatcacccgcgaagaagctataagacatgtacgtgcatggattggcttcgatgtcgaggggtgtcatgctactagagaagctgttggtaccaatttacctttacagctaggtttttctacaggtgttaacctagttgctgtacctacaggttatgttgatacacctaataatacagatttttccagagttagtgctaaaccaccgcctggagatcaatttaaacacctcataccacttatgtacaaaggacttccttggaatgtagtgcgtataaagattgtacaaatgttaagtgacacacttaaaaatctctctgacagagtcgtatttgtcttatgggcacatggctttgagttgacatctatgaagtattttgtgaaaataggacctgagcgcacctgttgtctatgtgatagacgtgccacatgcttttccactgcttcagacacttatgcctgttggcatcattctattggatttgattacgtctataatccgtttatgattgatgttcaacaatggggttttacaggtaacctacaaagcaaccatgatctgtattgtcaagtccatggtaatgcacatgtagctagttgtgatgcaatcatgactaggtgtctagctgtccacgagtgctttgttaagcgtgttgactggactattgaatatcctataattggtgatgaactgaagattaatgcggcttgtagaaaggttcaacacatggttgttaaagctgcattattagcagacaaattcccagttcttcacgacattggtaaccctaaagctattaagtgtgtacctcaagctgatgtagaatggaagttctatgatgcacagccttgtagtgacaaagcttataaaatagaagaattattctattcttatgccacacattctgacaaattcacagatggtgtatgcctattttggaattgcaatgtcgatagatatcctgctaattccattgtttgtagatttgacactagagtgctatctaaccttaacttgcctggttgtgatggtggcagtttgtatgtaaataaacatgcattccacacaccagcttttgataaaagtgcttttgttaatttaaaacaattaccatttttctattactctgacagtccatgtgagtctcatggaaaacaagtagtgtcagatatagattatgtaccactaaagtctgctacgtgtataacacgttgcaatttaggtggtgctgtctgtagacatcatgctaatgagtacagattgtatctcgatgcttataacatgatgatctcagctggctttagcttgtgggtttacaaacaatttgatacttataacctctggaacacttttacaagacttcagagtttagaaaatgtggcttttaatgttgtaaataagggacactttgatggacaacagggtgaagtaccagtttctatcattaataacactgtttacacaaaagttgatggtgttgatgtagaattgtttgaaaataaaacaacattacctgttaatgtagcatttgagctttgggctaagcgcaacattaaaccagtaccagaggtgaaaatactcaataatttgggtgtggacattgctgctaatactgtgatctgggactacaaaagagatgctccagcacatatatctactattggtgtttgttctatgactgacatagccaagaaaccaactgaaacgatttgtgcaccactcactgtcttttttgatggtagagttgatggtcaagtagacttatttagaaatgcccgtaatggtgttcttattacagaaggtagtgttaaaggtttacaaccatctgtaggtcccaaacaagctagtcttaatggagtcacattaattggagaagccgtaaaaacacagttcaattattataagaaagttgatggtgttgtccaacaattacctgaaacttactttactcagagtagaaatttacaagaatttaaacccaggagtcaaatggaaattgatttcttagaattagctatggatgaattcattgaacggtataaattagaaggctatgccttcgaacatatcgtttatggagattttagtcatagtcagttaggtggtttacatctactgattggactagctaaacgttttaaggaatcaccttttgaattagaagattttattcctatggacagtacagttaaaaactatttcataacagatgcgcaaacaggttcatctaagtgtgtgtgttctgttattgatttattacttgatgattttgttgaaataataaaatcccaagatttatctgtagtttctaaggttgtcaaagtgactattgactatacagaaatttcatttatgctttggtgtaaagatggccatgtagaaacattttacccaaaattacaatctagtcaagcgtggcaaccgggtgttgctatgcctaatctttacaaaatgcaaagaatgctattagaaaagtgtgaccttcaaaattatggtgatagtgcaacattacctaaaggcataatgatgaatgtcgcaaaatatactcaactgtgtcaatatttaaacacattaacattagctgtaccctataatatgagagttatacattttggtgctggttctgataaaggagttgcaccaggtacagctgttttaagacagtggttgcctacgggtacgctgcttgtcgattcagatcttaatgactttgtctctgatgcagattcaactttgattggtgattgtgcaactgtacatacagctaataaatgggatctcattattagtgatatgtacgaccctaagactaaaaatgttacaaaagaaaatgactctaaagagggttttttcacttacatttgtgggtttatacaacaaaagctagctcttggaggttccgtggctataaagataacagaacattcttggaatgctgatctttataagctcatgggacacttcgcatggtggacagcctttgttactaatgtgaatgcgtcatcatctgaagcatttttaattggatgtaattatcttggcaaaccacgcgaacaaatagatggttatgtcatgcatgcaaattacatattttggaggaatacaaatccaattcagttgtcttcctattctttatttgacatgagtaaatttccccttaaattaaggggtactgctgttatgtctttaaaagaaggtcaaatcaatgatatgattttatctcttcttagtaaaggtagacttataattagagaaaacaacagagttgttatttctagtgatgttcttgttaacaactaaacgaacaatgtttgtttttcttgttttattgccactagtctctagtcagtgtgttaatcttacaaccagaactcaattaccccctgcatacactaattctttcacacgtggtgtttattaccctgacaaagttttcagatcctcagttttacattcaactcaggacttgttcttacctttcttttccaatgttacttggttccatgctatacatgtctctgggaccaatggtactaagaggtttgctaaccctgtcctaccatttaatgatggtgtttattttgcttccactgagaagtctaacataataagaggctggatttttggtactactttagattcgaagacccagtccctacttattgttaataacgctactaatgttgttattaaagtctgtgaatttcaattttgtaatgatccatttttgggtgtttattaccacaaaaacaacaaaagttggatggaaagtgagttcagagtttattctagtgcgaataattgcacttttgaatatgtctctcagccttttcttatggaccttgaaggaaaacagggtaatttcaaaaatcttagggaatttgtgtttaagaatattgatggttattttaaaatatattctaagcacacgcctattaatttagtgcgtggtctccctcagggtttttcggctttagaaccattggtagatttgccaataggtattaacatcactaggtttcaaannnnnnctttacatagaagttatttgactcctggtgattcttcttcaggttggacagctggtgctgcagcttattatgtgggttatcttcaacctaggacttttctattaaaatataatgaaaatggaaccattacagatgctgtagactgtgcacttgaccctctctcagaaacaaagtgtacgttgaaatccttcactgtagaaaaaggaatctatcaaacttctaactttagagtccaaccaacagaatctattgttagatttcctaatattacaaacttgtgcccttttggtgaagtttttaacgccaccagatttgcatctgtttatgcttggaacaggaagagaatcagcaactgtgttgctgattattctgtcctatataattccgcatcattttccacttttaagtgttatggagtgtctcctactaaattaaatgatctctgctttactaatgtctatgcagattcatttgtaattagaggtgatgaagtcagacaaatcgctccagggcaaactggaaatattgctgattataattataaattaccagatgattttacaggctgcgttatagcttggaattctaacaatcttgattctaaggttggtggtaattataattacctgtatagattgtttaggaagtctaatctcaaaccttttgagagagatatttcaactgaaatctatcaggccggtagcacaccttgtaatggtgttaaaggttttaattgttactttcctttacaatcatatggtttccaacccacttatggtgttggttaccaaccatacagagtagtagtactttcttttgaacttctacatgcaccagcaactgtttgtggacctaaaaagtctactaatttggttaaaaacaaatgtgtcaatttcaacttcaatggtttaacaggcacaggtgttcttactgagtctaacaaaaagtttctgcctttccaacaatttggcagagacattgctgacactactgatgctgtccgtgatccacagacacttgagattcttgacattacaccatgttcttttggtggtgtcagtgttataacaccaggaacaaatacttctaaccaggttgctgttctttatcagggtgttaactgcacagaagtccctgttgctattcatgcagatcaacttactcctacttggcgtgtttattctacaggttctaatgtttttcaaacacgtgcaggctgtttaataggggctgaacatgtcaacaactcatatgagtgtgacatacccattggtgcaggtatatgcgctagttatcagactcagactaattctcctcggcgggcacgtagtgtagctagtcaatccatcattgcctacactatgtcacttggtgtagaaaattcagttgcttactctaataactctattgccatacccacaaattttactattagtgttaccacagaaattctaccagtgtctatgaccaagacatcagtagattgtacaatgtacatttgtggtgattcaactgaatgcagcaatcttttgttgcaatatggcagtttttgtacacaattaaaccgtgctttaactggaatagctgttgaacaagacaaaaacacccaagaagtttttgcacaagtcaaacaaatttacaaaacaccaccaattaaagattttggtggttttaatttttcacaaatattaccagatccatcaaaaccaagcaagaggtcatttattgaagatctacttttcaacaaagtgacacttgcagatgctggcttcatcaaacaatatggtgattgccttggtgatattgctgctagagacctcatttgtgcacaaaagtttaacggccttactgttttgccacctttgctcacagatgaaatgattgctcaatacacttctgcactgttagcgggtacaatcacttctggttggacctttggtgcaggtgctgcattacaaataccatttgctatgcaaatggcttataggtttaatggtattggagttacacagaatgttctctatgagaaccaaaaattgattgccaaccaatttaatagtgctattggcaaaattcaagactcactttcttccacagcaagtgcacttggaaaacttcaagatgtggtcaaccaaaatgcacaagctttaaacacgcttgttaaacaacttagctccaattttggtgcaatttcaagtgttttaaatgatatcctttcacgtcttgacaaagttgaggctgaagtgcaaattgataggttgatcacaggcagacttcaaagtttgcagacatatgtgactcaacaattaattagagctgcagaaatcagagcttctgctaatcttgctgctactaaaatgtcagagtgtgtacttggacaatcaaaaagagttgatttttgtggaaagggctatcatcttatgtccttccctcagtcagcacctcatggtgtagtcttcttgcatgtgacttatgtccctgcacaagaaaagaacttcacaactgctcctgccatttgtcatgatggaaaagcacactttcctcgtgaaggtgtctttgtttcaaatggcacacactggtttgtaacacaaaggaatttttatgaaccacaaatcattactacagacaacacatttgtgtctggtaactgtgatgttgtaataggaattgtcaacaacacagtttatgatcctttgcaacctgaattagactcattcaaggaggagttagataaatattttaagaatcatacatcaccagatgttgatttaggtgacatctctggcattaatgcttcagttgtaaacattcaaaaagaaattgaccgcctcaatgaggttgccaagaatttaaatgaatctctcatcgatctccaagaacttggaaagtatgagcagtatataaaatggccatggtacatttggctaggttttatagctggcttgattgccatagtaatggtgacaattatgctttgctgtatgaccagttgctgtagttgtctcaagggctgttgttcttgtggatcctgctgcaaatttgatgaagacgactctgagccagtgctcaaaggagtcaaattacattacacataaacgaacttatggatttgtttatgagaatcttcacaattggaactgtaactttgaagcaaggtgaaatcaaggatgctactccttcagattttgttcgcgctactgcaacgataccgatacaagcctcactccctttcggatggcttattgttggcgttgcacttcttgctgtttttcatagcgcttccaaaatcataaccctcaaaaagagatggcaactagcactctccaagggtgttcactttgtttgcaacttgctgttgttgtttgtaacagtttactcacaccttttgctcgttgctgctggccttgaagccccttttctctatctttatgctttagtctacttcttgcagagtataaactttgtaagaataataatgaggctttggctttgctggaaatgccgttccaaaaacccattactttatgatgccaactattttctttgctggcatactaattgttacgactattgtataccttacaatagtgtaacttcttcaattgtcattactttaggtgatggcacaacaagtcctatttctgaacatgactaccagattggtggttatactgaaaaatgggaatctggagtaaaagactgtgttgtattacacagttacttcacttcagactattaccagctgtactcaactcaattgagtacagacactggtgttgaacatgttaccttcttcatctacaataaaattgttgatgagcctgaagaacatgtccaaattcacacaatcgacggttcatccggagttgttaatccagtaatggaaccaatttatgatgaaccgacgacgactactagcgtgcctttgtaagcacaagctgatgagtacgaacttatgtactcattcgtttcggaagagacaggtacgttaatagttaatagcgtacttctttttcttgctttcgtggtattcttgctagttacactagccatccttactgcgcttcgattgtgtgcgtactgctgcaatattgttaacgtgagtcttgtaaaaccttctttttacgtttactctcgtgttaaaaatctgaattcttctagagttcttgatcttctggtctaaacgaactaaatattatattagtttttctgtttggaactttaattttagccatggcagattccaacggtactattaccgttgaagagcttaaaaagctccttgaacaatggaacctagtaataggtttcctattccttacatggatttgtcttctacaatttgcctatgccaacaggaataggtttttgtatataattaagttaattttcctctggctgttatggccagtaactttagcttgttttgtgcttgctgctgtttacagaataaattggatcaccggtggaattgctatcgcaatggcttgtcttgtaggcttgatgtggctcagctacttcattgcttctttcagactgtttgcgcgtacgcgttccatgtggtcattcaatccagaaactaacattcttctcaacgtgccactccatggcactattctgaccagaccgcttctagaaagtgaactcgtaatcggagctgtgatccttcgtggacatcttcgtattgctggacaccatctaggacgctgtgacatcaaggacctgcctaaagaaatcactgttgctacatcacgaacgctttcttattacaaattgggagcttcgcagcgtgtagcaggtgactcaggttttgctgcatacagtcgctacaggattggcaactataaattaaacacagaccattccagtagcagtgacaatattgctttgcttgtacagtaagcgacaacagatgtttcatctcgttgactttcaggttactatagcagagatattactaattattatgaggacttttaaagtttccatttggaatcttgattacatcataaacctcataattaaaaatttatctaagtcactaactgagaataaatattctcaattagatgaagagcaaccaatggagattgattaaacgaacatgaaaattattcttttcttggcactgataacactcgctacttgtgagctttatcactaccaagagtgtgttagaggtacaacagtacttttaaaagaaccttgctcttctggaacatacgagggcaattcaccatttcatcctctagctgataacaaatttgcactgacttgctttagcactcaatttgcttttgcttgtcctgacggcgtaaaacacgtctatcagttacgtgccagatcagtttcacctaaactgttcatcagacaagaggaagttcaagaactttactctccaatttttcttattgttgcggcaatagtgtttataacactttgcttcacactcaaaagaaagacagaatgattgaactttcattaattgacttctatttgtgctttttagcctttctgctattccttgttttaattatgcttattatcttttggttctcacttgaactgcaagatcataatgaaacttgtcacgcctaaacgaacatgaaatttcttgttttcttaggaatcatcacaactgtagctgcatttcaccaagaatgtagtttacagtcatgtactcaacatcaaccatatgtagttgatgacccgtgtcctattcacttctattctaaatggtatattagagtaggagctagaaaatcagcacctttaattgaattgtgcgtggatgaggctggttctaaatcacccattcagtacatcgatatcggtaattatacagtttcctgtttaccttttacaattaattgccaggaacctaaattgggtagtcttgtagtgcgttgttcgttctatgaagactttttagagtatcatgacgttcgtgttgttttagattttatctaaacgaacaaactaaaatgtctgataatggaccccaaaatcagcgaaatgcaccccgcattacgtttggtggaccctcagattcaactggcagtaaccagaatggagaacgcagtggggcgcgatcaaaacaacgtcggccccaaggtttacccaataatactgcgtcttggttcaccgctctcactcaacatggcaaggaagaccttaaattccctcgaggacaaggcgttccaattaacaccaatagcagtccagatgaccaaattggctactaccgaagagctaccagacgaattcgtggtggtgacggtaaaatgaaagatctcagtccaagatggtatttctactacctaggaactgggccagaagctggacttccctatggtgctaacaaagacggcatcatatgggttgcaactgagggagccttgaatacaccaaaagatcacattggcacccgcaatcctgctaacaatgctgcaatcgtgctacaacttcctcaaggaacaacattgccaaaaggcttctacgcagaagggagcagaggcggcagtcaagcctcttctcgttcctcatcacgtagtcgcaacagttcaagaaattcaactccaggcagcagtaggggaatttctcctgctagaatggctggcaatggcggtgatgctgctcttgctttgctgctgcttgacagattgaaccagcttgagagcaaaatgtctggtaaaggccaacaacaacaaggccaaactgtcactaagaaatctgctgctgaggcttctaagaagcctcggcaaaaacgtactgccactaaagcatacaatgtaacacaagctttcggcagacgtggtccagaacaaacccaaggaaattttggggaccaggaactaatcagacaaggaactgattacaaacattggccgcaaattgcacaatttgcccccagcgcttcagcgttcttcggaatgtcgcgcattggcatggaagtcacaccttcgggaacgtggttgacctacacaggtgccatcaaattggatgacaaagatccaaatttcaaagatcaagtcattttgctgaataagcatattgacgcatacaaaacattcccaccaacagagcctaaaaaggacaaaaagaagaaggctgatgaaactcaagccttaccgcagagacagaagaaacagcaaactgtgactcttcttcctgctgcagatttggatgatttctccaaacaattgcaacaatccatgagcagtgctgactcaactcaggcctaaactcatgcagaccacacaaggcagatgggctatataaacgttttcgcttttccgtttacgatatatagtctactcttgtgcagaatgaattctcgtaactacatagcacaagtagatgtagttaactttaatctcacatagcaatctttaatcagtgtgtaacattagggaggacttgaaagagccaccacattttcaccgaggccacgcggagtacgatcgagtgtacagtgaacaatgctagggagagctgcctatatggaagagccctaatgtgtaaaattaattttagtagtgctatccccatgnnnnnnnnnnnnnnnnnnnnnnnnnnnnnaaaaaaaaaaaaaaaaaaaaaaaaaaaaaaaaa

SEQ ID NO: 19 - protein, 1272 aa, SARS-CoV2
  misc_feature (240)..(242): Xaa can be any naturally occurring amino acid
MFVFLVLLPLVSSQCVNLTTRTQLPPAYTNSFTRGVYYPDKVFRSSVLHSTQDLFLPFFSNVTWFHAIHVSGTNGTKRFANPVLPFNDGVYFASTEKSNIIRGWIFGTTLDSKTQSLLIVNNATNVVIKVCEFQFCNDPFLGVYYHKNNKSWMESEFRVYSSANNCTFEYVSQPFLMDLEGKQGNFKNLREFVFKNIDGYFKIYSKHTPINLVRGLPQGFSALEPLVDLPIGINITRFQXXXLHRSYLTPGDSSSGWTAGAAAYYVGYLQPRTFLLKYNENGTITDAVDCALDPLSETKCTLKSFTVEKGIYQTSNFRVQPTESIVRFPNITNLCPFGEVFNATRFASVYAWNRKRISNCVADYSVLYNSASFSTFKCYGVSPTKLNDLCFTNVYADSFVIRGDEVRQIAPGQTGNIADYNYKLPDDFTGCVIAWNSNNLDSKVGGNYNYLYRLFRKSNLKPFERDISTEIYQAGSTPCNGVKGFNCYFPLQSYGFQPTYGVGYQPYRVVVLSFELLHAPATVCGPKKSTNLVKNKCVNFNFNGLTGTGVLTESNKKFLPFQQFGRDIADTTDAVRDPQTLEILDITPCSFGGVSVITPGTNTSNQVAVLYQGVNCTEVPVAIHADQLTPTWRVYSTGSNVFQTRAGCLIGAEHVNNSYECDIPIGAGICASYQTQTNSPRRARSVASQSIIAYTMSLGVENSVAYSNNSIAIPTNFTISVTTEILPVSMTKTSVDCTMYICGDSTECSNLLLQYGSFCTQLNRALTGIAVEQDKNTQEVFAQVKQIYKTPPIKDFGGFNFSQILPDPSKPSKRSFIEDLLFNKVTLADAGFIKQYGDCLGDIAARDLICAQKFNGLTVLPPLLTDEMIAQYTSALLAGTITSGWTFGAGAALQIPFAMQMAYRFNGIGVTQNVLYENQKLIANQFNSAIGKIQDSLSSTASALGKLQDVVNQNAQALNTLVKQLSSNFGAISSVLNDILSRLDKVEAEVQIDRLITGRLQSLQTYVTQQLIRAAEIRASANLAATKMSECVLGQSKRVDFCGKGYHLMSFPQSAPHGVVFLHVTYVPAQEKNFTTAPAICHDGKAHFPREGVFVSNGTHWFVTQRNFYEPQIITTDNTFVSGNCDVVIGIVNNTVYDPLQPELDSFKEELDKYFKNHTSPDVDLGDISGINASVVNIQKEIDRLNEVAKNLNESLIDLQELGKYEQYIKWPWYIWLGFIAGLIAIVMVTIMLCCMTSCCSCLKGCCSCGSCCKFDEDDSEPVLKGVKLHYT

SEQ ID NO: 20 - DNA, 29819 bp, SARS-CoV2
caactttcgatctcttgtagatctgttctctaaacgaactttaaaatctgtgtggctgtcactcggctgcatgcttagtgcactcacgcagtataattaataactaattactgtcgttgacaggacacgagtaactcgtctatcttctgcaggctgcttacggtttcgtccgtgttgcagccgatcatcagcacatctaggttttgtccgggtgtgaccgaaaggtaagatggagagccttgtccctggtttcaacgagaaaacacacgtccaactcagtttgcctgttttacaggttcgcgacgtgctcgtacgtggctttggagactccgtggaggaggtcttatcagaggcacgtcaacatcttaaagatggcacttgtggcttagtagaagttgaaaaaggcgttttgcctcaacttgaacagccctatgtgttcatcaaacgttcggatgctcgaactgcacctcatggtcatgttatggttgagctggtagcagaactcgaaggcattcagtacggtcgtagtggtgagacacttggtgtccttgtccctcatgtgggcgaaataccagtggcttaccgcaaggttcttcttcgtaagaacggtaataaaggagctggtggccatagttacggcgccgatctaaagtcatttgacttaggcgacgagcttggcactgatccttatgaagactttcaagaaaactggaacactaaacatagcagtggtgttacccgtgaactcatgcgtgagcttaacggaggggcatacactcgctatgtcgataacaacttctgtggccctgatggctaccctcttgagtgcattaaagaccttctagcacgtgctggtaaagcttcatgcactttgtccgaacaactggactttattgacactaagaggggtgtatactgctgccgtgaacatgagcatgaaattgcttggtacacggaacgttctgaaaagagctatgaattgcagacaccttttgaaattaaattggcaaagaaatttgacaccttcaatggggaatgtccaaattttgtatttcccttaaattccataatcaagactattcaaccaagggttgaaaagaaaaagcttgatggctttatgggtagaattcgatctgtctatccagttgcgtcaccaaatgaatgcaaccaaatgtgcctttcaactctcatgaagtgtgatcattgtggtgaaacttcatggcagacgggcgattttgttaaagccacttgcgaattttgtggcactgagaatttgactaaagaaggtgccactacttgtggttacttaccccaaaatgctgttgttaaaatttattgtccagcatgtcacaattcagaagtaggacctgagcatagtcttgccgaataccataatgaatctggcttgaaaaccattcttcgtaagggtggtcgcactattgcctttggaggctgtgtgttctcttatgttggttgccataacaagtgtgcctattgggttccacgtgctagcgctaacataggttgtaaccatacaggtgttgttggagaaggttccgaaggtcttaatgacaaccttcttgaaatactccaaaaagagaaagtcaacatcaatattgttggtgactttaaacttaatgaagagatcgccattattttggcatctttttctgcttccacaagtgcttttgtggaaactgtgaaaggtttggattataaagcattcaaacaaattgttgaatcctgtggtaattttaaagttacaaaaggaaaagctaaaaaaggtgcctggaatattggtgaacagaaatcaatactgagtcctctttatgcatttgcatcagaggctgctcgtgttgtacgatcaattttctcccgcactcttgaaactgctcaaaattctgtgcgtgttttacagaaggccgctataacaatactagatggaatttcacagtattcactgagactcattgatgctatgatgttcacatctgatttggctactaacaatctagttgtaatggcctacattacaggtggtgttgttcagttgacttcgcagtggctaactaacatctttggcactgtttatgaaaaactcaaacccgtccttgattggcttgaagagaagtttaaggaaggtgtagagtttcttagagacggttgggaaattgttaaatttatctcaacctgtgcttgtgaaattgtcggtggacaaattgtcacctgtgcaaaggaaattaaggagagtgttcagacattctttaagcttgtaaataaatttttggctttgtgtgctgactctatcattattggtggagctaaacttaaagccttgaatttaggtgaaacatttgtcacgcactcaaagggattgtacagaaagtgtgttaaatccagagaagaaactggcctactcatgcctctaaaagccccaaaagaaattatcttcttagagggagaaacacttcccacagaagtgttaacagaggaagttgtcttgaaaactggtgatttacaaccattagaacaacctactagtgaagctgttgaagctccattggttggtacaccagtttgtattaacgggcttatgttgctcgaaatcaaagacacagaaaagtactgtgcccttgcacctaatatgatggtaacaaacaataccttcacactcaaaggcggtgcaccaacaaaggttacttttggtgatgatactgtgatagaagtgcaaggttacaagagtgtgaatatcacttttgaacttgatgaaaggattgataaagtacttaatgagaagtgctctgcctatacagttgaactcggtacagaagtaaatgagttcgcctgtgttgtggcagatgctgtcataaaaactttgcaaccagtatctgaattacttacaccactgggcattgatttagatgagtggagtatggctacatactacttatttgatgagtctggtgagtttaaattggcttcacatatgtattgttctttttaccctccagatgaggatgaagaagaaggtgattgtgaagaagaagagtttgagccatcaactcaatatgagtatggtactgaagatgattaccaaggtaaacctttggaatttggtgccacttctgctgctcttcaacctgaagaagagcaagaagaagattggttagatgatgatagtcaacaaactgttggtcaacaagacggcagtgaggacaatcagacaactactattcaaacaattgttgaggttcaacctcaattagagatggaacttacaccagttgttcagactattgaagtgaatagttttagtggttatttaaaacttactgacaatgtatacattaaaaatgcagacattgtggaagaagctaaaaaggtaaaaccaacagtggttgttaatgcagccaatgtttaccttaaacatggaggaggtgttgcaggagccttaaataaggctactaacaatgccatgcaagttgaatctgatgattacatagctactaatggaccacttaaagtgggtggtagttgtgttttaagcggacacaatcttgctaaacactgtcttcatgttgtcggcccaaatgttaacaaaggtgaagacattcaacttcttaagagtgcttatgaaaattttaatcagcacgaagttctacttgcaccattattatcagctggtatttttggtgctgaccctatacattctttaagagtttgtgtagatactgttcgcacaaatgtctacttagctgtctttgataaaaatctctatgacaaacttgttttaagctttttggaaatgaagagtgaaaagcaagttgaacaaaagatcgctgagattcctaaagaggaagttaagccatttataactgaaagtaaaccttcagttgaacagagaaaacaagatgataagaaaatcaaagcttgtgttgaagaagttacaacaactctggaagaaactaagttcctcacagaaaacttgttactttatattgacattaatggcaatcttcatccagattctgccactcttgttagtgacattgacatcactttcttaaagaaagatgctccatatatagtgggtgatgttgttcaagagggtgttttaactgctgtggttatacctactaaaaaggctggtggcactactgaaatgctagcgaaagctttgagaaaagtgccaacagacaattatataaccacttacccgggtcagggtttaaatggttacactgtagaggaggcaaagacagtgcttaaaaagtgtaaaagtgccttttacattctaccatctattatctctaatgagaagcaagaaattcttggaactgtttcttggaatttgcgagaaatgcttgcacatgcagaagaaacacgcaaattaatgcctgtctgtgtggaaactaaagccatagtttcaactatacagcgtaaatataagggtattaaaatacaagagggtgtggttgattatggtgctagattttacttttacaccagtaaaacaactgtagcgtcacttatcaacacacttaacgatctaaatgaaactcttgttacaatgccacttggctatgtaacacatggcttaaatttggaagaagctgctcggtatatgagatctctcaaagtgccagctacagtttctgtttcttcacctgatgctgttacagcgtataatggttatcttacttcttcttctaaaacacctgaagaacattttattgaaaccatctcacttgctggttcctataaagattggtcctattctggacaatctacacaactaggtatagaatttcttaagagaggtgataaaagtgtatattacactagtaatcctaccacattccacctagatggtgaagttatcacctttgacaatcttaagacacttctttctttgagagaagtgaggactattaaggtgtttacaacagtagacaacattaacctccacacgcaagttgtggacatgtcaatgacatatggacaacagtttggtccaacttatttggatggagctgatgttactaaaataaaacctcataattcacatgaaggtaaaacattttatgttttacctaatgatgacactctacgtgttgaggcttttgagtactaccacacaactgatcctagttttctgggtaggtacatgtcagcattaaatcacactaaaaagtggaaatacccacaagttaatggtttaacttctattaaatgggcagataacaactgttatcttgccactgcattgttaacactccaacaaatagagttgaagtttaatccacctgctctacaagatgcttattacagagcaagggctggtgaagctgctaacttttgtgcacttatcttagcctactgtaataagacagtaggtgagttaggtgatgttagagaaacaatgagttacttgtttcaacatgccaatttagattcttgcaaaagagtcttgaacgtggtgtgtaaaacttgtggacaacagcagacaacccttaagggtgtagaagctgttatgtacatgggcacactttcttatgaacaatttaagaaaggtgttcagataccttgtacgtgtggtaaacaagctacacaatatctagtacaacaggagtcaccttttgttatgatgtcagcaccacctgctcagtatgaacttaagcatggtacatttacttgtgctagtgagtacactggtaattaccagtgtggtcactataaacatataacttctaaagaaactttgtattgcatagacggtgctttacttacaaagtcctcagaatacaaaggtcctattacggatgttttctacaaagaaaacagttacacaacaaccataaaaccagttacttataaattggatggtgttgtttgtacagaaattgaccctaagttggacaattattataagaaagacaattcttatttcacagagcaaccaattgatcttgtaccaaaccaaccatatccaaacgcaagcttcgataattttaagtttgtatgtgataatatcaaatttgctgatgatttaaaccagttaactggttataagaaacctgcttcaagagagcttaaagttacatttttccctgacttaaatggtgatgtggtggctattgattataaacactacacaccctcttttaagaaaggagctaaattgttacataaacctattgtttggcatgttaacaatgcaactaataaagccacgtataaaccaaatacctggtgtatacgttgtctttggagcacaaaaccggttgaaacatcaaattcgtttgatgtactgaagtcagaggacgcgcagggaatggataatcttgcctgcgaagatctaaaaccagtctctgaagaagtagtggaaaatcctaccatacagaaagacgttcttgagtgtaatgtgaaaactaccgaagttgtaggagacattatacttaaaccagcaaataatagtttaaaaattacagaagaggttggccacacagatctaatggctgcttatgtagacaattctagtcttactattaagaaacctaatgaattatctagagtgttaggtttgaaaacccttgctactcatggtttagctgctgttaatagtgtcccttgggatactatagctaattatgctaagccttttcttaacaaagttgttagtacaactactaacatagttacacggtgtttaaaccgtgtttgtactaattatatgccttatttctttactttattgctacaattgtgtacttttactagaagtacaaattctagaattaaagcatctatgccgactactatagcaaagaatactgttaagagtgtcggtaaattttgtctagaggcttcatttaattatttgaagtcacctaatttttctaaactgataaatattataatttggtttttactattaagtgtttgcctaggttctttaatctactcaaccgctgctttaggtgttttaatgtctaatttaggcatgccttcttactgtactggttacagagaaggctatttgaactctactaatgtcactattgcaacctactgtactggttctataccttgtagtgtttgtcttagtggtttagattctttagacacctatccttctttagaaactatacaaattaccatttcatcttttaaatgggatttaactgcttttggcttagttgcagagtggtttttggcatatattcttttcactaggtttttctatgtacttggattggctgcaatcatgcaattgtttttcagctattttgcagtacattttattagtaattcttggcttatgtggttaataattaatcttgtacaaatggccccgatttcagctatggttagaatgtacatcttctttgcatcattttattatgtatggaaaagttatgtgcatgttgtagacggttgtaattcatcaacttgtatgatgtgttacaaacgtaatagagcaacaagagtcgaatgtacaactattgttaatggtgttagaaggtccttttatgtctatgctaatggaggtaaaggcttttgcaaactacacaattggaattgtgttaattgtgatacattctgtgctggtagtacatttattagtgatgaagttgcgagagacttgtcactacagtttaaaagaccaataaatcctactgaccagtcttcttacatcgttgatagtgttacagtgaagaatggttccatccatctttactttgataaagctggtcaaaagacttatgaaagacattctctctctcattttgttaacttagacaacctgagagctaataacactaaaggttcattgcctattaatgttatagtttttgatggtaaatcaaaatgtgaagaatcatctgcaaaatcagcgtctgtttactacagtcagcttatgtgtcaacctatactgttactagatcaggcattagtgtctgatgttggtgatagtgcggaagttgcagttaaaatgtttgatgcttacgttaatacgttttcatcaacttttaacgtaccaatggaaaaactcaaaacactagttgcaactgcagaagctgaacttgcaaagaatgtgtccttagacaatgtcttatctacttttatttcagcagctcggcaagggtttgttgattcagatgtagaaactaaagatgttgttgaatgtcttaaattgtcacatcaatctgacatagaagttactggcgatagttgtaataactatatgctcacctataacaaagttgaaaacatgacaccccgtgaccttggtgcttgtattgactgtagtgcgcgtcatattaatgcgcaggtagcaaaaagtcacaacattgctttgatatggaacgttaaagatttcatgtcattgtctgaacaactacgaaaacaaatacgtagtgctgctaaaaagaataacttaccttttaagttgacatgtgcaactactagacaagttgttaatgttgtaacaacaaagatagcacttaagggtggtaaaattgttaataattggttgaagcagttaattaaagttacacttgtgttcctttttgttgctgctattttctatttaataacacctgttcatgtcatgtctaaacatactgacttttcaagtgaaatcataggatacaaggctattgatggtggtgtcactcgtgacatagcatctacagatacttgttttgctaacaaacatgctgattttgacacatggtttagccagcgtggtggtagttatactaatgacaaagcttgcccattgattgctgcagtcataacaagagaagtgggttttgtcgtgcctggtttgcctggcacgatattacgcacaactaatggtgactttttgcatttcttacctagagtttttagtgcagttggtaacatctgttacacaccatcaaaacttatagagtacactgactttgcaacatcagcttgtgttttggctgctgaatgtacaatttttaaagatgcttctggtaagccagtaccatattgttatgataccaatgtactagaaggttctgttgcttatgaaaatttacgccctgacacacgttatgtgctcatggatggctctattattcaatttcctaacacctaccttgaaggttctgttagagtggtaacaacttttgattctgagtactgtaggcacggcacttgtgaaagatcagaagctggtgtttgtgtatctactagtggtagatgggtacttaacaatgattattacagatctttaccaggagttttctgtggtgtagatgctgtaaatttacttactaatatgtttacaccactaattcaacctattggtgctttggacatatcagcatctatagtagctggtggtattgtagctatcgtagtaacatgccttgcctactattttatgaggtttagaagagcttttggtgaatacagtcatgtagttgcctttaatactttactattccttatgtcattcactgtactctgtttaacaccagtttactcattcttacctggtgtttattctgttatttacttgtacttgacattttatcttactaatgatgtttcttttttagcacatattcagtggatggttatgttcacacctttagtacctttctggataacaattgcttatatcatttgtatttccacaaagcatttctattggttctttagtaattacctaaagagacgtgtagtctttaatggtgtttcctttagtacttttgaagaagctgcgctgtgcacctttttgttaaataaagaaatgtatctaaagttgcgtagtgatgtgctattacctcttacgcaatataatagatacttagctctttataataagtacaagtattttagtggagcaatggatacaactagctacagagaagctgcttgttgtcatctcgcaaaggctctcaatgacttcagtaactcaggttctgatgttctttaccaaccaccacaaacctctatcacctcagctgttttgcagagtggttttagaaaaatggcattcccatctggtaaagttgagggttgtatggtacaagtaacttgtggtacaactacacttaacggtctttggcttgatgacgtagtttactgtccaagacatgtgatctgcacctctgaagacatgcttaaccctaattatgaagatttactcattcgtaagtctaatcataatttcttggtacaggctggtaatgttcaactcagggttattggacattctatgcaaaattgtgtacttaagcttaaggttgatacagccaatcctaagacacctaagtataagtttgttcgcattcaaccaggacagactttttcagtgttagcttgttacaatggttcaccatctggtgtttaccaatgtgctatgaggcccaatttcactattaagggttcattccttaatggttcatgtggtagtgttggttttaacatagattatgactgtgtctctttttgttacatgcaccatatggaattaccaactggagttcatgctggcacagacttagaaggtaacttttatggaccttttgttgacaggcaaacagcacaagcagctggtacggacacaactattacagttaatgttttagcttggttgtacgctgctgttataaatggagacaggtggtttctcaatcgatttaccacaactcttaatgactttaaccttgtggctatgaagtacaattatgaacctctaacacaagaccatgttgacatactaggacctctttctgctcaaactggaattgtcgttttagatatgtgtgcttcattaaaagaattactgcaaaatggtatgaatggacgtaccatattgggtagtgctttattagaagatgaatttacaccttttgatgttgttagacaatgctcaggtgttactttccaaagtgcagtgaaaagaacaatcaagggtacacaccactggttgttactcacaattttgacttcacttttagttttagtccagagtactcaatggtctttgttcttttttttgtatgaaaatgcctttttaccttttgctatgggtattattgctatgtctgcttttgcaatgatgtttgtcaaacataagcatgcatttctctgtttgtttttgttaccttctcttgccactgtagcttattttaatatggtctatatgcctgctagttgggtgatgcgtattatgacatggttggatatggttgatactagtttgaagctaaaagactgtgttatgtatgcatcagctgtagtgttactaatccttatgacagcaagaactgtgtatgatgatggtgctaggagagtgtggacacttatgaatgtcttgacactcgtttataaagtttattatggtaatgctttagatcaagccatttccatgtgggctcttataatctctgttacttctaactactcaggtgtagttacaactgtcatgtttttggccagaggtattgtttttatgtgtgttgagtattgccctattttcttcataactggtaatacacttcagtgtataatgctagtttattgtttcttaggctatttttgtacttgttactttggcctcttttgtttactcaaccgctactttagactgactcttggtgtttatgattacttagtttctacacaggagtttagatatatgaattcacagggactactcccacccaagaatagcatagatgccttcaaactcaacattaaattgttgggtgttggtggcaaaccttgtatcaaagtagccactgtacagtctaaaatgtcagatgtaaagtgcacatcagtagtcttactctcagttttgcaacaactcagagtagaatcatcatctaaattgtgggctcaatgtgtccagttacacaatgacattctcttagctaaagatactactgaagcctttgaaaaaatggtttcactactttctgttttgctttccatgcagggtgctgtagacataaacaagctttgtgaagaaatgctggacaacagggcaaccttacaagctatagcctcagagtttagttcccttccatcatatgcagcttttgctactgctcaagaagcttatgagcaggctgttgctaatggtgattctgaagttgttcttaaaaagttgaagaagtctttgaatgtggctaaatctgaatttgaccgtgatgcagccatgcaacgtaagttggaaaagatggctgatcaagctatgacccaaatgtataaacaggctagatctgaggacaagagggcaaaagttactagtgctatgcagacaatgcttttcactatgcttagaaagttggataatgatgcactcaacaacattatcaacaatgcaagagatggttgtgttcccttgaacataatacctcttacaacagcagccaaactaatggttgtcataccagactataacacatataaaaatacgtgtgatggtacaacatttacttatgcatcagcattgtgggaaatccaacaggttgtagatgcagatagtaaaattgttcaacttagtgaaattagtatggacaattcacctaatttagcatggcctcttattgtaacagctttaagggccaattctgctgtcaaattacagaataatgagcttagtcctgttgcactacgacagatgtcttgtgctgccggtactacacaaactgcttgcactgatgacaatgcgttagcttattacaacacaacaaagggaggtaggtttgtacttgcactgttatccgatttacaggatttgaaatgggctagattccctaagagtgatggaactggtactatctatacagaactggaaccaccttgtaggtttgttacagacacacctaaaggtcctaaagtgaagtatttatactttattaaaggattaaacaacctaaatagaggtatggtacttggtagtttagctgccacagtacgtctacaagctggtaatgcaacagaagtgcctgccaattcaactgtattatctttctgtgcttttgctgtagatgctgctaaagcttacaaagattatctagctagtgggggacaaccaatcactaattgtgttaagatgttgtgtacacacactggtactggtcaggcaataacagttacaccggaagccaatatggatcaagaatcctttggtggtgcatcgtgttgtctgtactgccgttgccacatagatcatccaaatcctaaaggattttgtgacttaaaaggtaagtatgtacaaatacctacaacttgtgctaatgaccctgtgggttttacacttaaaaacacagtctgtaccgtctgcggtatgtggaaaggttatggctgtagttgtgatcaactccgcgaacccatgcttcagtcagctgatgcacaatcgtttttaaacgggtttgcggtgtaagtgcagcccgtcttacaccgtgcggcacaggcactagtactgatgtcgtatacagggcttttgacatctacaatgataaagtagctggttttgctaaattcctaaaaactaattgttgtcgcttccaagaaaaggacgaagatgacaatttaattgattcttactttgtagttaagagacacactttctctaactaccaacatgaagaaacaatttataatttacttaaggattgtccagctgttgctaaacatgacttctttaagtttagaatagacggtgacatggtaccacatatatcacgtcaacgtcttactaaatacacaatggcagacctcgtctatgctttaaggcattttgatgaaggtaattgtgatacattaaaagaaatacttgtcacatacaattgttgtgatgatgattatttcaataaaaaggactggtatgattttgtagaaaacccagatatattacgcgtatacgccaacttaggtgaacgtgtacgccaagctttgttaaaaacagtacaattctgtgatgccatgcgaaatgctggtattgttggtgtactgacattagataatcaagatctcaatggtaactggtatgatttcggtgatttcatacaaaccacgccaggtagtggagttcctgttgtagattcttattattcattgttaatgcctatattaaccttgaccagggctttaactgcagagtcacatgttgacactgacttaacaaagccttacattaagtgggatttgttaaaatatgacttcacggaagagaggttaaaactctttgaccgttattttaaatattgggatcagacataccacccaaattgtgttaactgtttggatgacagatgcattctgcattgtgcaaactttaatgttttattctctacagtgttcccacttacaagttttggaccactagtgagaaaaatatttgttgatggtgttccatttgtagtttcaactggataccacttcagagagctaggtgttgtacataatcaggatgtaaacttacatagctctagacttagttttaaggaattacttgtgtatgctgctgaccctgctatgcacgctgcttctggtaatctattactagataaacgcactacgtgcttttcagtagctgcacttactaacaatgttgcttttcaaactgtcaaacccggtaattttaacaaagacttctatgactttgctgtgtctaagggtttctttaaggaaggaagttctgttgaattaaaacacttcttctttgctcaggatggtaatgctgctatcagcgattatgactactatcgttataatctaccaacaatgtgtgatatcagacaactactatttgtagttgaagttgttgataagtactttgattgttacgatggtggctgtattaatgctaaccaagtcatcgtcaacaacctagacaaatcagctggttttccatttaataaatggggtaaggctagactttattatgattcaatgagttatgaggatcaagatgcacttttcgcatatacaaaacgtaatgtcatccctactataactcaaatgaatcttaagtatgccattagtgcaaagaatagagctcgcaccgtagctggtgtctctatctgtagtactatgaccaatagacagtttcatcaaaaattattgaaatcaatagccgccactagaggagctactgtagtaattggaacaagcaaattctatggtggttggcacaacatgttaaaaactgtttatagtgatgtagaaaaccctcaccttatgggttgggattatcctaaatgtgatagagccatgcctaacatgcttagaattatggcctcacttgttcttgctcgcaaacatacaacgtgttgtagcttgtcacaccgtttctatagattagctaatgagtgtgctcaagtattgagtgaaatggtcatgtgtggcggttcactatatgttaaaccaggtggaacctcatcaggagatgccacaactgcttatgctaatagtgtttttaacatttgtcaagctgtcacggccaatgttaatgcacttttatctactgatggtaacaaaattgccgataagtatgtccgcaatttacaacacagactttatgagtgtctctatagaaatagagatgttgacacagactttgtgaatgagttttacgcatatttgcgtaaacatttctcaatgatgatactctctgacgatgctgttgtgtgtttcaatagcacttatgcatctcaaggtctagtggctagcataaagaactttaagtcagttctttattatcaaaacaatgtttttatgtctgaagcaaaatgttggactgagactgaccttactaaaggacctcatgaattttgctctcaacatacaatgctagttaaacagggtgatgattatgtgtaccttccttacccagatccatcaagaatcctaggggccggctgttttgtagatgatatcgtaaaaacagatggtacacttatgattgaacggttcgtgtctttagctatagatgcttacccacttactaaacatcctaatcaggagtatgctgatgtctttcatttgtacttacaatacataagaaagctacatgatgagttaacaggacacatgttagacatgtattctgttatgcttactaatgataacacttcaaggtattgggaacctgagttttatgaggctatgtacacaccgcatacagtcttacaggctgttggggcttgtgttctttgcaattcacagacttcattaagatgtggtgcttgcatacgtagaccattcttatgttgtaaatgctgttacgaccatgtcatatcaacatcacataaattagtcttgtctgttaatccgtatgtttgcaatgctccaggttgtgatgtcacagatgtgactcaactttacttaggaggtatgagctattattgtaaatcacataaaccacccattagttttccattgtgtgctaatggacaagtttttggtttatataaaaatacatgtgttggtagcgataatgttactgactttaatgcaattgcaacatgtgactggacaaatgctggtgattacattttagctaacacctgtactgaaagactcaagctttttgcagcagaaacgctcaaagctactgaggagacatttaaactgtcttatggtattgctactgtacgtgaagtgctgtctgacagagaattacatctttcatgggaagttggtaaacctagaccaccacttaaccgaaattatgtctttactggttatcgtgtaactaaaaacagtaaagtacaaataggagagtacacctttgaaaaaggtgactatggtgatgctgttgtttaccgaggtacaacaacttacaaattaaatgttggtgattattttgtgctgacatcacatacagtaatgccattaagtgcacctacactagtgccacaagagcactatgttagaattactggcttatacccaacactcaatatctcagatgagttttctagcaatgttgcaaattatcaaaaggttggtatgcaaaagtattctacactccagggaccacctggtactggtaagagtcattttgctattggcctagctctctactacccttctgctcgcatagtgtatacagcttgctctcatgccgctgttgatgcactatgtgagaaggcattaaaatatttgcctatagataaatgtagtagaattatacctgcacgtgctcgtgtagattgttttgataaattcaaagtgaattcaacattagaacagtatgtcttttgtactgtaaatgcattgcctgagacgacagcagatatagttgtctttgatgaaatttcaatggccacaaattatgatttgagtgttgtcaatgccagattacgtgctaagcactatgtgtacattggcgaccctgctcaattacctgcaccacgcacattgctaactaagggcacactagaaccagaatatttcaattcagtgtgtagacttatgaaaactataggtccagacatgttcctcggaacttgtcggcgttgtcctgctgaaattgttgacactgtgagtgctttggtttatgataataagcttaaagcacataaagacaaatcagctcaatgctttaaaatgttttataagggtgttatcacgcatgatgtttcatctgcaattaacaggccacaaataggcgtggtaagagaattccttacacgtaaccctgcttggagaaaagctgtctttatttcaccttataattcacagaatgctgtagcctcaaagattttgggactaccaactcaaactgttgattcatcacagggctcagaatatgactatgtcatattcactcaaaccactgaaacagctcactcttgtaatgtaaacagatttaatgttgctattaccagagcaaaagtaggcatactttgcataatgtctgatagagacctttatgacaagttgcaatttacaagtcttgaaattccacgtaggaatgtggcaactttacaagctgaaaatgtaacaggactctttaaagattgtagtaaggtaatcactgggttacatcctacacaggcacctacacacctcagtgttgacactaaattcaaaactgaaggtttatgtgttgacatacctggcatacctaaggacatgacctatagaagactcatctctatgatgggttttaaaatgaattatcaagttaatggttaccctaacatgtttatcacccgcgaagaagctataagacatgtacgtgcatggattggcttcgatgtcgaggggtgtcatgctactagagaagctgttggtaccaatttacctttacagctaggtttttctacaggtgttaacctagttgctgtacctacaggttatgttgatacacctaataatacagatttttccagagttagtgctaaaccaccgcctggagatcaatttaaacacctcataccacttatgtacaaaggacttccttggaatgtagtgcgtataaagattgtacaaatgttaagtgacacacttaaaaatctctctgacagagtcgtatttgtcttatgggcacatggctttgagttgacatctatgaagtattttgtgaaaataggacctgagcgcacctgttgtctatgtgatagacgtgccacatgcttttccactgcttcagacacttatgcctgttggcatcattctattggatttgattacgtctataatccgtttatgattgatgttcaacaatggggttttacaggtaacctacaaagcaaccatgatctgtattgtcaagtccatggtaatgcacatgtagctagttgtgatgcaatcatgactaggtgtctagctgtccacgagtgctttgttaagcgtgttgactggactattgaatatcctataattggtgatgaactgaagattaatgcggcttgtagaaaggttcaacacatggttgttaaagctgcattattagcagacaaattcccagttcttcacgacattggtaaccctaaagctattaagtgtgtacctcaagctgatgtagaatggaagttctatgatgcacagccttgtagtgacaaagcttataaaatagaagaattattctattcttatgccacacattctgacaaattcacagatggtgtatgcctattttggaattgcaatgtcgatagatatcctgctaattccattgtttgtagatttgacactagagtgctatctaaccttaacttgcctggttgtgatggtggcagtttgtatgtaaataaacatgcattccacacaccagcttttgataaaagtgcttttgttaatttaaaacaattaccatttttctattactctgacagtccatgtgagtctcatggaaaacaagtagtgtcagatatagattatgtaccactaaagtctgctacgtgtataacacgttgcaatttaggtggtgctgtctgtagacatcatgctaatgagtacagattgtatctcgatgcttataacatgatgatctcagctggctttagcttgtgggtttacaaacaatttgatacttataacctctggaacacttttacaagacttcagagtttagaaaatgtggcttttaatgttgtaaataagggacactttgatggacaacagggtgaagtaccagtttctatcattaataacactgtttacacaaaagttgatggtgttgatgtagaattgtttgaaaataaaacaacattacctgttaatgtagcatttgagctttgggctaagcgcaacattaaaccagtaccagaggtgaaaatactcaataatttgggtgtggacattgctgctaatactgtgatctgggactacaaaagagatgctccagcacatatatctactattggtgtttgttctatgactgacatagccaagaaaccaactgaaacgatttgtgcaccactcactgtcttttttgatggtagagttgatggtcaagtagacttatttagaaatgcccgtaatggtgttcttattacagaaggtagtgttaaaggtttacaaccatctgtaggtcccaaacaagctagtcttaatggagtcacattaattggagaagccgtaaaaacacagttcaattattataagaaagttgatggtgttgtccaacaattacctgaaacttactttactcagagtagaaatttacaagaatttaaacccaggagtcaaatggaaattgatttcttagaattagctatggatgaattcattgaacggtataaattagaaggctatgccttcgaacatatcgtttatggagattttagtcatagtcagttaggtggtttacatctactgattggactagctaaacgttttaaggaatcaccttttgaattagaagattttattcctatggacagtacagttaaaaactatttcataacagatgcgcaaacaggttcatctaagtgtgtgtgttctgttattgatttattacttgatgattttgttgaaataataaaatcccaagatttatctgtagtttctaaggttgtcaaagtgactattgactatacagaaatttcatttatgctttggtgtaaagatggccatgtagaaacattttacccaaaattacaatctagtcaagcgtggcaaccgggtgttgctatgcctaatctttacaaaatgcaaagaatgctattagaaaagtgtgaccttcaaaattatggtgatagtgcaacattacctaaaggcataatgatgaatgtcgcaaaatatactcaactgtgtcaatatttaaacacattaacattagctgtaccctataatatgagagttatacattttggtgctggttctgataaaggagttgcaccaggtacagctgttttaagacagtggttgcctacgggtacgctgcttgtcgattcagatcttaatgactttgtctctgatgcagattcaactttgattggtgattgtgcaactgtacatacagctaataaatgggatctcattattagtgatatgtacgaccctaagactaaaaatgttacaaaagaaaatgactctaaagagggttttttcacttacatttgtgggtttatacaacaaaagctagctcttggaggttccgtggctataaagataacagaacattcttggaatgctgatctttataagctcatgggacacttcgcatggtggacagcctttgttactaatgtgaatgcgtcatcatctgaagcatttttaattggatgtaattatcttggcaaaccacgcgaacaaatagatggttatgtcatgcatgcaaattacatattttggaggaatacaaatccaattcagttgtcttcctattctttatttgacatgagtaaatttccccttaaattaaggggtactgctgttatgtctttaaaagaaggtcaaatcaatgatatgattttatctcttcttagtaaaggtagacttataattagagaaaacaacagagttgttatttctagtgatgttcttgttaacaactaaacgaacaatgtttgtttttcttgttttattgccactagtctctagtcagtgtgttaattttacaaacagaactcaattaccctctgcatacactaattctttcacacgtggtgtttattaccctgacaaagttttcagatcctcagttttacattcaactcaggacttgttcttacctttcttttccaatgttacttggttccatgctatacatgtctctgggaccaatggtactaagaggtttgataaccctgtcctaccatttaatgatggtgtttattttgcttccactgagaagtctaacataataagaggctggatttttggtactactttagattcgaagacccagtccctacttattgttaataacgctactaatgttgttattaaagtctgtgaatttcaattttgtaattatccatttttgggtgtttattaccacaaaaacaacaaaagttggatggaaagtgagttcagagtttattctagtgcgaataattgcacttttgaatatgtctctcagccttttcttatggaccttgaaggaaaacagggtaatttcaaaaatcttagtgaatttgtgtttaagaatattgatggttattttaaaatatattctaagcacacgcctattaatttagtgcgtgatctccctcagggtttttcggctttagaaccattggtagatttgccaataggtattaacatcactaggtttcaaactttacttgctttacatagaagttatttgactcctggtgattcttcttcaggttggacagctggtgctgcagcttattatgtgggttatcttcaacctaggacttttctattaaaatataatgaaaatggaaccattacagatgctgtagactgtgcacttgaccctctctcagaaacaaagtgtacgttgaaatccttcactgtagaaaaaggaatctatcaaacttctaactttagagtccaaccaacagaatctattgttagatttcctaatattacaaacttgtgcccttttggtgaagtttttaacgccaccagatttgcatctgtttatgcttggaacaggaagagaatcagcaactgtgttgctgattattctgtcctatataattccgcatcattttccacttttaagtgttatggagtgtctcctactaaattaaatgatctctgctttactaatgtctatgcagattcatttgtaattagaggtgatgaagtcagacaaatcgctccagggcaaactggaacgattgctgattataattataaattaccagatgattttacaggctgcgttatagcttggaattctaacaatcttgattctaaggttggtggtaattataattacctgtatagattgtttaggaagtctaatctcaaaccttttgagagagatatttcaactgaaatctatcaggccggtagcacaccttgtaatggtgttaaaggttttaattgttactttcctttacaatcatatggtttccaacccacttatggtgttggttaccaaccatacagagtagtagtactttcttttgaacttctacatgcaccagcaactgtttgtggacctaaaaagtctactaatttggttaaaaacaaatgtgtcaatttcaacttcaatggtttaacaggcacaggtgttcttactgagtctaacaaaaagtttctgcctttccaacaatttggcagagacattgctgacactactgatgctgtccgtgatccacagacacttgagattcttgacattacaccatgttcttttggtggtgtcagtgttataacaccaggaacaaatacttctaatcaggttgctgttctttatcagggtgttaactgcacagaagtccctgttgctattcatgcagatcaacttactcctacttggcgtgtttattctacaggttctaatgtttttcaaacacgtgcaggctgtttaataggggctgaatatgtcaacaactcatatgagtgtgacatacccattggtgcaggtatatgcgctagttatcagactcagactaattctcctcggcgggcacgtagtgtagctagtcaatccatcattgcctacactatgtcacttggtgcagaaaattcagttgcttactctaataactctattgccatacccacaaattttactattagtgttaccacagaaattctaccagtgtctatgaccaagacatcagtagattgtacaatgtacatttgtggtgattcaactgaatgcagcaatcttttgttgcaatatggcagtttttgtacacaattaaaccgtgctttaactggaatagctgttgaacaagacaaaaacacccaagaagtttttgcacaagtcaaacaaatttacaaaacaccaccaattaaagattttggtggttttaatttttcacaaatattaccagatccatcaaaaccaagcaagaggtcatttattgaagatctacttttcaacaaagtgacacttgcagatgctggcttcatcaaacaatatggtgattgccttggtgatattgctgctagagacctcatttgtgcacaaaagtttaacggccttactgttttgccacctttgctcacagatgaaatgattgctcaatacacttctgcactgttagcgggtacaatcacttctggttggacctttggtgcaggtgctgcattacaaataccatttgctatgcaaatggcttataggtttaatggtattggagttacacagaatgttctctatgagaaccaaaaattgattgccaaccaatttaatagtgctattggcaaaattcaagactcactttcttccacagcaagtgcacttggaaaacttcaagatgtggtcaaccaaaatgcacaagctttaaacacgcttgttaaacaacttagctccaattttggtgcaatttcaagtgttttaaatgatatcctttcacgtcttgacaaagttgaggctgaagtgcaaattgataggttgatcacaggcagacttcaaagtttgcagacatatgtgactcaacaattaattagagctgcagaaatcagagcttctgctaatcttgctgctattaaaatgtcagagtgtgtacttggacaatcaaaaagagttgatttttgtggaaagggctatcatcttatgtccttccctcagtcagcacctcatggtgtagtcttcttgcatgtgacttatgtccctgcacaagaaaagaacttcacaactgctcctgccatttgtcatgatggaaaagcacactttcctcgtgaaggtgtctttgtttcaaatggcacacactggtttgtaacacaaaggaatttttatgaaccacaaatcattactacagacaacacatttgtgtctggtaactgtgatgttgtaataggaattgtcaacaacacagtttatgatcctttgcaacctgaattagactcattcaaggaggagttagataaatattttaagaatcatacatcaccagatgttgatttaggtgacatctctggcattaatgcttcatttgtaaacattcaaaaagaaattgaccgcctcaatgaggttgccaagaatttaaatgaatctctcatcgatctccaagaacttggaaagtatgagcagtatataaaatggccatggtacatttggctaggttttatagctggcttgattgccatagtaatggtgacaattatgctttgctgtatgaccagttgctgtagttgtctcaagggctgttgttcttgtggatcctgctgcaaatttgatgaagacgactctgagccagtgctcaaaggagtcaaattacattacacataaacgaacttatggatttgtttatgagaatcttcacaattggaactgtaactttgaagcaaggtgaaatcaaggatgctactccttcagattttgttcgcgctactgcaacgataccgatacaagcctcactccctttcggatggcttattgttggcgttgcacttcttgctgtttttcagagcgcttccaaaatcataaccctcaaaaagagatggcaactagcactctccaagggtgttcactttgtttgcaacttgctgttgttgtttgtaacagtttactcacaccttttgctcgttgctgctggccttgaagccccttttctctatctttatgctttagtctacttcttgcagagtataaactttgtaagaataataatgaggctttggctttgctggaaatgccgttccaaaaacccattactttatgatgccaactattttctttgctggcatactaattgttacgactattgtataccttacaatagtgtaacttcttcaattgtcattacttcaggtgatggcacaacaagtcctatttctgaacatgactaccagattggtggttatactgaaaaatgggaatctggagtaaaagactgtgttgtattacacagttacttcacttcagactattaccagctgtactcaactcaattgagtacagacactggtgttgaacatgttaccttcttcatctacaataaaattgttgatgagcctgaagaacatgtccaaattcacacaatcgacggttcacccggagttgttaatccagtaatggaaccaatttatgatgaaccgacgacgactactagcgtgcctttgtaagcacaagctgatgagtacgaacttatgtactcattcgtttcggaagagacaggtacgttaatagttaatagcgtacttctttttcttgctttcgtggtattcttgctagttacactagccatccttactgcgcttcgattgtgtgcgtactgctgcaatattgttaacgtgagtcttgtaaaaccttctttttacgtttactctcgtgttaaaaatctgaattcttctagagttcctgatcttctggtctaaacgaactaaatattatattagtttttctgtttggaactttaattttagccatggcagattccaacggtactattaccgttgaagagcttaaaaagctccttgaacaatggaacctagtaataggtttcctattccttacatggatttgtcttctacaatttgcctatgccaacaggaataggtttttgtatataattaagttaattttcctctggctgttatggccagtaactttagcttgttttgtgcttgctgctgtttacagaataaattggatcaccggtggaattgctatcgcaatggcttgtcttgtaggcttgatgtggctcagctacttcattgcttctttcagactgtttgcgcgtacgcgttccatgtggtcattcaatccagaaactaacattcttctcaacgtgccactccatggcactattctgaccagaccgcttctagaaagtgaactcgtaatcggagctgtgatccttcgtggacatcttcgtattgctggacaccatctaggacgctgtgacatcaaggacctgcctaaagaaatcactgttgctacatcacgaacgctttcttattacaaattgggagcttcgcagcgtgtagcaggtgactcaggttttgctgcatacagtcgctacaggattggcaactataaattaaacacagaccattccagtagcagtgacaatattgctttgcttgtacagtaagtgacaacagatgtttcatctcgttgactttcaggttactatagcagagatattactaattattatgaggacttttaaagtttccatttggaatcttgattacatcataaacctcataattaaaaatttatctaagtcactaactgagaataaatattctcaattagatgaagagcaaccaatggagattgattaaacgaacatgaaaattattcttttcttggcactgataacactcgctacttgtgagctttatcactaccaagagtgtgttagaggtacaacagtacttttaaaagaaccttgctcttctggaacatacgagggcaattcaccatttcatcctctagctgataacaaatttgcactgacttgctttagcactcaatttgcttttgcttgtcctgacggcgtaaaacacgtctatcagttacgtgccagatcagtttcacctaaactgttcatcagacaagaggaagttcaagaactttactctccaatttttcttattgttgcggcaatagtgtttataacactttgcttcacactcaaaagaaagacagaatgattgaactttcattaattgacttctatttgtgctttttagcctttctgctattccttgttttaattatgcttattatcttttggttctcacttgaactgcaagatcataatgaaacttgtcacgcctaaacgaacatgaaatttcttgttttcttaggaatcatcacaactgtagctgcatttcaccaagaatgtagtttacagtcatgtactcaacatcaaccatatgtagttgatgacccgtgtcctattcacttctattctaaatggtatattagagtaggagctagaaaatcagcacctttaattgaattgtgcgtggatgaggctggttctaaatcacccattcagtacatcgatatcggtaattatacagtttcctgtttaccttttacaattaattgccagaaacctaaattgggtagtcttgtagtgcgttgttcgttctatgaagactttttagagtatcatgacgttcgtgttgttttagatttcatctaaacgaacaaacaaactaaaatgtctgataatggaccccaaaatcagcgaaatgcaccccgcattacgtttggtggaccctcagattcaactggcagtaaccagaatggagaacgcagtggggcgcgatcaaaacaacgtcggccccaaggtttacccaataatactgcgtcttggttcaccgctctcactcaacatggcaaggaagaccttaaattccctcgaggacaaggcgttccaattaacaccaatagcagtcgagatgaccaaattggctactaccgaagagctaccagacgaattcgtggtggtgacggtaaaatgaaagatctcagtccaagatggtatttctactacctaggaactgggccagaagctggacttccctatggtgctaacaaagacggcatcatatgggttgcaactgagggagccttgaatacaccaaaagatcacattggcacccgcaatcctgctaacaatgctgcaatcgtgctacaacttcctcaaggaacaacattgccaaaaggcttctacgcagaagggagcagaggcggcagtcaagcctcttctcgttcctcatcacgtagtcgcaacagttcaagaaattcaactccaggcagctctaaacgaacttctcctgctagaatggctggcaatggcggtgatgctgctcttgctttgctgctgcttgacagattgaaccagcttgagagcaaaatgtctggtaaaggccaacaacaacaaggccaaactgtcactaagaaatctgctgctgaggcttctaagaagcctcggcaaaaacgtactgccactaaagcatacaatgtaacacaagctttcggcagacgtggtccagaacaaacccaaggaaattttggggaccaggaactaatcagacaaggaactgattacaaacattggccgcaaattgcacaatttgcccccagcgcttcagcgttcttcggaatgtcgcgcattggcatggaagtcacaccttcgggaacgtggttgacctacacaggtgccatcaaattggatgacaaagatccaaatttcaaagatcaagtcattttgctgaataagcatattgacgcatacaaaacattcccaccaacagagcctaaaaaggacaaaaagaagaaggctgatgaaactcaagccttaccgcagagacagaagaaacagcaaactgtgactcttcttcctgctgcagatttggatgatttctccaaacaattgcaacaatccatgagcagtgctgactcaactcaggcctaaactcatgcagaccacacaaggcagatgggctatataaacgttttcgcttttccgtttacgatatatagtctactcttgtgcagaatgaattctcgtaactacatagcacaagtagatgtagttaactttaatctcacatagcaatctttaatcagtgtgtaacattagggaggacttgaaagagccaccacattttcaccgaggccacgcggagtacgatcgagtgtacagtgaacaatgctagggagagctgcctatatggaagagccctaatgtgtaaaattaattttagtagtgctaaccccatgtgattttaatagcttctta

SEQ ID NO: 21 - protein, 1273 aa, SARS-CoV2
MFVFLVLLPLVSSQCVNFTNRTQLPSAYTNSFTRGVYYPDKVFRSSVLHSTQDLFLPFFSNVTWFHAIHVSGTNGTKRFDNPVLPFNDGVYFASTEKSNIIRGWIFGTTLDSKTQSLLIVNNATNVVIKVCEFQFCNYPFLGVYYHKNNKSWMESEFRVYSSANNCTFEYVSQPFLMDLEGKQGNFKNLSEFVFKNIDGYFKIYSKHTPINLVRDLPQGFSALEPLVDLPIGINITRFQTLLALHRSYLTPGDSSSGWTAGAAAYYVGYLQPRTFLLKYNENGTITDAVDCALDPLSETKCTLKSFTVEKGIYQTSNFRVQPTESIVRFPNITNLCPFGEVFNATRFASVYAWNRKRISNCVADYSVLYNSASFSTFKCYGVSPTKLNDLCFTNVYADSFVIRGDEVRQIAPGQTGTIADYNYKLPDDFTGCVIAWNSNNLDSKVGGNYNYLYRLFRKSNLKPFERDISTEIYQAGSTPCNGVKGFNCYFPLQSYGFQPTYGVGYQPYRVVVLSFELLHAPATVCGPKKSTNLVKNKCVNFNFNGLTGTGVLTESNKKFLPFQQFGRDIADTTDAVRDPQTLEILDITPCSFGGVSVITPGTNTSNQVAVLYQGVNCTEVPVAIHADQLTPTWRVYSTGSNVFQTRAGCLIGAEYVNNSYECDIPIGAGICASYQTQTNSPRRARSVASQSIIAYTMSLGAENSVAYSNNSIAIPTNFTISVTTEILPVSMTKTSVDCTMYICGDSTECSNLLLQYGSFCTQLNRALTGIAVEQDKNTQEVFAQVKQIYKTPPIKDFGGFNFSQILPDPSKPSKRSFIEDLLFNKVTLADAGFIKQYGDCLGDIAARDLICAQKFNGLTVLPPLLTDEMIAQYTSALLAGTITSGWTFGAGAALQIPFAMQMAYRFNGIGVTQNVLYENQKLIANQFNSAIGKIQDSLSSTASALGKLQDVVNQNAQALNTLVKQLSSNFGAISSVLNDILSRLDKVEAEVQIDRLITGRLQSLQTYVTQQLIRAAEIRASANLAAIKMSECVLGQSKRVDFCGKGYHLMSFPQSAPHGVVFLHVTYVPAQEKNFTTAPAICHDGKAHFPREGVFVSNGTHWFVTQRNFYEPQIITTDNTFVSGNCDVVIGIVNNTVYDPLQPELDSFKEELDKYFKNHTSPDVDLGDISGINASFVNIQKEIDRLNEVAKNLNESLIDLQELGKYEQYIKWPWYIWLGFIAGLIAIVMVTIMLCCMTSCCSCLKGCCSCGSCCKFDEDDSEPVLKGVKLHYT

SEQ ID NO: 22 - DNA, 29883 bp, SARS-CoV2
  misc_feature (29849)..(29883): n is a, c, g, or t
attaaaggtttataccttcccaggtaacaaaccaaccaactttcgatctcttgtagatctgttctctaaacgaactttaaaatctgtgtggctgtcactcggctgcatgcttagtgcactcacgcagtataattaataactaattactgtcgttgacaggacacgagtaactcgtctatcttctgcaggctgcttacggtttcgtccgtgttgcagccgatcatcagcacatctaggttttgtccgggtgtgaccgaaaggtaagatggagagccttgtccctggtttcaacgagaaaacacacgtccaactcagtttgcctgttttacaggttcgcgacgtgctcgtacgtggctttggagactccgtggaggaggtcttatcagaggcacgtcaacatcttaaagatggcacttgtggcttagtagaagttgaaaaaggcgttttgcctcaacttgaacagccctatgtgttcatcaaacgttcggatgctcgaactgcacctcatggtcatgttatggttgagctggtagcagaactcgaaggcattcagtacggtcgtagtggtgagacacttggtgtccttgtccctcatgtgggcgaaataccagtggcttaccgcaaggttcttcttcgtaagaacggtaataaaggagctggtggccatagttacggcgccgatctaaagtcatttgacttaggcgacgagcttggcactgatccttatgaagattttcaagaaaactggaacactaaacatagcagtggtgttacccgtgaactcatgcgtgagcttaacggaggggcatacactcgctatgtcgataacaacttctgtggccctgatggctaccctcttgagtgcattaaagaccttctagcacgtgctggtaaagcttcatgcactttgtctgaacaactggactttattgacactaagaggggtgtatactgctgccgtgaacatgagcatgaaattgcttggtacacggaacgttctgaaaagagctatgaattgcagacaccttttgaaattaaattggcaaagaaatttgacaccttcaatggggaatgtccaaattttgtatttcccttaaattccataatcaagactattcaaccaagggttgaaaagaaaaagcttgatggctttatgggtagaattcgatctgtctatccagttgcgtcaccaaatgaatgcaaccaaatgtgcctttcaactctcatgaagtgtgatcattgtggtgaaacttcatggcagacgggcgattttgttaaagccacttgcgaattttgtggcactgagaatttgactaaagaaggtgccactacttgtggttacttaccccaaaatgctgttgttaaaatttattgtccagcatgtcacaattcagaagtaggacctgagcatagtcttgccgaataccataatgaatctggcttgaaaaccattcttcgtaagggtggtcgcactattgcctttggaggctgtgtgttctcttatgttggttgccataacaagtgtgcctattgggttccacgtgctagcgctaacataggttgtaaccatacaggtgttgttggagaaggttccgaaggtcttaatgacaaccttcttgaaatactccaaaaagagaaagtcaacatcaatattgttggtgactttaaacttaatgaagagatcgccattattttggcatctttttctgcttccacaagtgcttttgtggaaactgtgaaaggtttggattataaagcattcaaacaaattgttgaatcctgtggtaattttaaagttacaaaaggaaaagctaaaaaaggtgcctggaatattggtgaacagaaatcaatactgagtcctctttatgcatttgcatcagaggctgctcgtgttgtacgatcaattttctcccgcactcttgaaactgctcaaaattctgtgcgtgttttacagaaggccgctataacaatactagatggaatttcacagtattcactgagactcattgatgctatgatgttcacatctgatttggctactaacaatctagttgtaatggcctacattacaggtggtgttgttcagttgacttcgcagtggctaactaacatctttggcactgtttatgaaaaactcaaacccgtccttgattggcttgaagagaagtttaaggaaggtgtagagtttcttagagacggttgggaaattgttaaatttatctcaacctgtgcttgtgaaattgtcggtggacaaattgtcacctgtgcaaaggaaattaaggagagtgttcagacattctttaagcttgtaaataaatttttggctttgtgtgctgactctatcattattggtggagctaaacttaaagccttgaatttaggtgaaacatttgtcacgcactcaaagggattgtacagaaagtgtgttaaatccagagaagaaactggcctactcatgcctctaaaagccccaaaagaaattatcttcttagagggagaaacacttcccacagaagtgttaacagaggaagttgtcttgaaaactggtgatttacaaccattagaacaacctactagtgaagctgttgaagctccattggttggtacaccagtttgtattaacgggcttatgttgctcgaaatcaaagacacagaaaagtactgtgcccttgcacctaatatgatggtaacaaacaataccttcacactcaaaggcggtgcaccaacaaaggttacttttggtgatgacactgtgatagaagtgcaaggttacaagagtgtgaatatcacttttgaacttgatgaaaggattgataaagtacttaatgagaagtgctctgcctatacagttgaactcggtacagaagtaaatgagttcgcctgtgttgtggcagatgctgtcataaaaactttgcaaccagtatctgaattacttacaccactgggcattgatttagatgagtggagtatggctacatactacttatttgatgagtctggtgagtttaaattggcttcacatatgtattgttctttttaccctccagatgaggatgaagaagaaggtgattgtgaagaagaagagtttgagccatcaactcaatatgagtatggtactgaagatgattaccaaggtaaacctttggaatttggtgccacttctgctgctcttcaacctgaagaagagcaagaagaagattggttagatgatgatagtcaacaaactgttggtcaacaagacggcagtgaggacaatcagacaactattattcaaacaattgttgaggttcaacctcaattagagatggaacttacaccagttgttcagactattgaagtgaatagttttagtggttatttaaaacttactgacaatgtatacattaaaaatgcagacattgtggaagaagctaaaaaggtaaaaccaacagtggttgttaatgcagccaatgtttaccttaaacatggaggaggtgttgcaggagccttaaataaggctactaacaatgccatgcaagttgaatctgatgattacatagctactaatggaccacttaaagtgggtggtagttgtgttttaagcggacacaatcttgctaaacactgtcttcatgttgtcggcccaaatgttaacaaaggtgaagacattcaacttcttaagagtgcttatgaaaattttaatcagcacgaagttctacttgcaccattattatcagctggtatttttggtgctgaccctatacattctttaagagtttgtgtagatactgttcgcacaaatgtctacttagctgtctttgataaaaatctctatgacaaacttgtttcaagctttttggaaatgaagagtgaaaagcaagttgaacaaaagatcgctgagattcctaaagaggaagttaagccatttataactgaaagtaaaccttcagttgaacagagaaaacaagatgataagaaaatcaaagcttgtgttgaagaagttacaacaactctggaagaaactaagttcctcacagaaaacttgttactttatattgacattaatggcaatcttcatccagattctgccactcttgttagtgacattgacatcactttcttaaagaaagatgctccatatatagtgggtgatgttgttcaagagggtgttttaactgctgtggttatacctactaaaaaggctggtggcactactgaaatgctagcgaaagctttgagaaaagtgccaacagacaattatataaccacttacccgggtcagggtttaaatggttacactgtagaggaggcaaagacagtgcttaaaaagtgtaaaagtgccttttacattctaccatctattatctctaatgagaagcaagaaattcttggaactgtttcttggaatttgcgagaaatgcttgcacatgcagaagaaacacgcaaattaatgcctgtctgtgtggaaactaaagccatagtttcaactatacagcgtaaatataagggtattaaaatacaagagggtgtggttgattatggtgctagattttacttttacaccagtaaaacaactgtagcgtcacttatcaacacacttaacgatctaaatgaaactcttgttacaatgccacttggctatgtaacacatggcttaaatttggaagaagctgctcggtatatgagatctctcaaagtgccagctacagtttctgtttcttcacctgatgctgttacagcgtataatggttatcttacttcttcttctaaaacacctgaagaacattttattgaaaccatctcacttgctggttcctataaagattggtcctattctggacaatctacacaactaggtatagaatttcttaagagaggtgataaaagtgtatattacactagtaatcctaccacattccacctagatggtgaagttatcacctttgacaatcttaagacacttctttctttgagagaagtgaggactattaaggtgtttacaacagtagacaacattaatctccacacgcaagttgtggacatgtcaatgacatatggacaacagtttggtccaacttatttggatggagctgatgttactaaaataaaacctcataattcacatgaaggtaaaacattttatgttttacctaatgatgacactctacgtgttgaggcttttgagtactaccacacaactgatcctagttttctgggtaggtacatgtcagcattaaatcacactaaaaagtggaaatacccacaagttaatggtttaacttctattaaatgggcagataacaactgttatcttgccactgcattgttaacactccaacaaatagagttgaagtttaatccacctgctctacaagatgcttattacagagcaagggctggtgaagctgataacttttgtgcacttatcttagcctactgtaataagacagtaggtgagttaggtgatgttagagaaacaatgagttacttgtttcaacatgccaatttagattcttgcaaaagagtcttgaacgtggtgtgtaaaacttgtggacaacagcagacaacccttaagggtgtagaagctgttatgtacatgggcacactttcttatgaacaatttaagaaaggtgttcagataccttgtacgtgtggtaaacaagctacaaaatatctagtacaacaggagtcaccttttgttatgatgtcagcaccacctgctcagtatgaacttaagcatggtacatttacttgtgctagtgagtacactggtaattaccagtgtggtcactataaacatataacttctaaagaaactttgtattgcatagacggtgctttacttacaaagtcctcagaatacaaaggtcctattacggatgttttctacaaagaaaacagttacacaacaaccataaaaccagttacttataaattggatggtgttgtttgtacagaaattgaccctaagttggacaattattataagaaagacaattcttattttacagagcaaccaattgatcttgtaccaaaccaaccatatccaaacgcaagcttcgataattttaagtttgtatgtgataatatcaaatttgctgatgatttaaaccagttaactggttataagaaacctgcttcaagagagcttaaagttacatttttccctgacttaaatggtgatgtggtggctattgattataaacactacacaccctcttttaagaaaggagctaaattgttacataaacctattgtttggcatgttaacaatgcaactaataaagccacgtataaaccaaatacctggtgtatacgttgtctttggagcacaaaaccagttgaaacatcaaattcgtttgatgtactgaagtcagaggacgcgcagggaatggataatcttgcctgcgaagatctaaaaccagtctctgaagaagtagtggaaaatcctaccatacagaaagacgttcttgagtgtaatgtgaaaactaccgaagttgtaggagacattatacttaaaccagcaaataatagtttaaaaattacagaagaggttggccacacagatctaatggctgcttatgtagacaattctagtcttactattaagaaacctaatgaattatctagagtattaggtttgaaaacccttgttactcatggtttagctgctgttaatagtgtcccttgggatactatagctaattatgctaagccttttcttaacaaagttgttagtacaactactaacatagttacacggtgtttaaaccgtgtttgtactaattatatgccttatttctttactttattgctacaattgtgtacttttactagaagtacaaattctagaattaaagcatctatgccgactactatagcaaagaatactgttaagagtgtcggtaaattttgtctagaggcttcatttaattatttgaagtcacctaatttttctaaactgataaatattacaatttggtttttactattaagtgtttgcctaggttctttaatctactcaaccgctgctttaggtgttttaatgtctaatttaggcatgccttcttactgtactggttacagagaaggctatttgaactctactaatgtcactattgcaacctactgtactggttctataccttgtagtgtttgtcttagtggtttagattctttagacacctatccttctttagaaactatacaaattaccatttcatcttttaaatgggatttaactgcttttggcttagttgcagagtggtttttggcatatattcttttcactaggtttttctatgtacttggattggctgcaatcatgcaattgtttttcagctattttgcagtacattttattagtaattcttggcttatgtggttaataattaatcttgtacaaatggccccgatttcagctatggttagaatgtacatcttctttgcatcattttattatgtatggaaaagttatgtgcatgttgtagacggttgtaattcatcaacttgtatgatgtgttacaaacgtaatagagcaacaagagtcgaatgtacaactattgttaatggtgttagaaggtccttttatgtctatgctaatggaggtaaaggcttttgcaaactacacaattggaattgtgttaattgtgatacattctgtgctggtagtacatttattagtgatgaagttgcgagagacttgtcactacagtttaaaagaccaataaatcctactgaccagtcttcttacatcgttgatagtgttacagtgaagaatggttccatccatctttactttgataaagctggtcaaaagacttatgaaagacattctctctctcattttgttaacttagacaacctgagagctaataacactaaaggttcattgcctattaatgttatagtttttgatggtaaatcaaaatgtgaagaatcatctgcaaaatcagcgtctgtttactacagtcagcttatgtgtcaacctatactgttactagatcaggcattagtgtctgatgttggtgatagtgcggaagttgcagttaaaatgtttgatgcttacgttaatacgttttcatcaacttttaacgtaccaatggaaaaactcaaaacactagttgcaactgcagaagctgaacttgcaaagaatgtgtccttagacaatgtcttatctacttttatttcagcagctcggcaagggtttgttgattcagatgtagaaactaaagatgttgttgaatgtcttaaattgtcacatcaatctgacatagaagttactggcgatagttgtaataactatatgctcacctataacaaagttgaaaacatgacaccccgtgaccttggtgcttgtattgactgtagtgcgcgtcatattaatgcgcaggtagcaaaaagtcacaacattgctttgatatggaacgttaaagatttcatgtcattgtctgaacaactacgaaaacaaatacgtagtgctgctaaaaagaataacttaccttttaagttgacatgtgcaactactagacaagttgttaatgttgtaacaacaaagatagcacttaagggtggtaaaattgttaataattggttgaagcagttaattaaagttacacttgtgttcctttttgttgctgctattttctatttaataacacctgttcatgtcatgtctaaacatactgacttttcaagtgaaatcataggatacaaggctattgatggtggtgtcactcgtgacatagcatctacagatacttgttttgctaacaaacatgctgattttgacacatggtttagccagcgtggtggtagttatactaatgacaaagcttgcccattgattgctgcagtcataacaagagaagtgggttttgtcgtgcctggtttgcctggcacgatattacgcacaactaatggtgactttttgcatttcttacctagagtttttagtgcagttggtaacatctgttacacaccatcaaaacttatagagtacactgactttgcaacatcagcttgtgttttggctgctgaatgtacaatttttaaagatgcttctggtaagccagtaccatattgttatgataccaatgtactagaaggttctgttgcttatgaaagtttacgccctgacacacgttatgtgctcatggatggctctattattcaatttcctaacacctaccttgaaggttctgttagagtggtaacaacttttgattctgagtactgtaggcacggcacttgtgaaagatcagaagctggtgtttgtgtatctactagtggtagatgggtacttaacaatgattattacagatctttaccaggagttttctgtggtgtagatgctgtaaatttacttactaatatgtttacaccactaattcaacctattggtgctttggacatatcagcatctatagtagctggtggtattgtagctatcgtagtaacatgccttgcctactattttatgaggtttagaagagcttttggtgaatacagtcatgtagttgcctttaatactttactattccttatgtcattcactgtactctgtttaacaccagtttactcattcttacctggtgtttattctgttatttacttgtacttgacattttatcttactaatgatgtttcttttttagcacatattcagtggatggttatgttcacacctttagtacctttctggataacaattgcttatatcatttgtatttccacaaagcatttctattggttctttagtaattacctaaagagacgtgtagtctttaatggtgtttcctttagtacttttgaagaagctgcgctgtgcacctttttgttaaataaagaaatgtatctaaagttgcgtagtgatgtgctattacctcttacgcaatataatagatacttagctctttataataagtacaagtattttagtggagcaatggatacaactagctacagagaagctgcttgttgtcatctcgcaaaggctctcaatgacttcagtaactcaggttctgatgttctttaccaaccaccacaaacctctatcacctcagctgttttgcagagtggttttagaaaaatggcattcccatctggtaaagttgagggttgtatggtacaagtaacttgtggtacaactacacttaacggtctttggcttgatgacgtagtttactgtccaagacatgtgatctgcacctctgaagacatgcttaaccctaattatgaagatttactcattcgtaagtctaatcataatttcttggtacaggctggtaatgttcaactcagggttattggacattctatgcaaaattgtgtacttaagcttaaggttgatacagccaatcctaagacacctaagtataagtttgttcgcattcaaccaggacagactttttcagtgttagcttgttacaatggttcaccatctggtgtttaccaatgtgctatgaggcccaatttcactattaagggttcattccttaatggttcatgtggtagtgttggttttaacatagattatgactgtgtctctttttgttacatgcaccatatggaattaccaactggagttcatgctggcacagacttagaaggtaacttttatggaccttttgttgacaggcaaacagcacaagcagctggtacggacacaactattacagttaatgttttagcttggttgtacgctgctgttataaatggagacaggtggtttctcaatcgatttaccacaactcttaatgactttaaccttgtggctatgaagtacaattatgaacctctaacacaagaccatgttgacatactaggacctctttctgctcaaactggaattgccgttttagatatgtgtgcttcattaaaagaattactgcaaaatggtatgaatggacgtaccatattgggtagtgctttattagaagatgaatttacaccttttgatgttgttagacaatgctcaggtgttactttccaaagtgcagtgaaaagaacaatcaagggtacacaccactggttgttactcacaattttgacttcacttttagttttagtccagagtactcaatggtctttgttcttttttttgtatgaaaatgcctttttaccttttgctatgggtattattgctatgtctgcttttgcaatgatgtttgtcaaacataagcatgcatttctctgtttgtttttgttaccttctcttgccactgtagcttattttaatatggtctatatgcctgctagttgggtgatgcgtattatgacatggttggatatggttgatactagtttgaagctaaaagactgtgttatgtatgcatcagctgtagtgttactaatccttatgacagcaagaactgtgtatgatgatggtgctaggagagtgtggacacttatgaatgtcttgacactcgtttataaagtttattatggtaatgctttagatcaagccatttccatgtgggctcttataatctctgttacttctaactactcaggtgtagttacaactgtcatgtttttggccagaggtattgtttttatgtgtgttgagtattgccctattttcttcataactggtaatacacttcagtgtataatgctagtttattgtttcttaggctatttttgtacttgttactttggcctcttttgtttactcaaccgctactttagactgactcttggtgtttatgattacttagtttctacacaggagtttagatatatgaattcacagggactactcccacccaagaatagcatagatgccttcaaactcaacattaaattgttgggtgttggtggcaaaccttgtatcaaagtagccactgtacagtctaaaatgtcagatgtaaagtgcacatcartagtcttactctcagttttgcaacaactcagagtagaatcatcatctaaattgtgggctcaatgtgtccagttacacaatgacattctcttagctaaagatactactgaagcctttgaaaaaatggtttcactactttctgttttgctttccatgcagggtgctgtagacataaacaagctttgtgaagaaatgctggacaacagggcaaccttacaagctatagcctcagagtttagttcccttccatcatatgcagcttttgctactgctcaagaagcttatgagcaggctgttgctaatggtgattctgaagttgttcttaaaaagttgaagaagtctttgaatgtggctaaatctgaatttgaccgtgatgcagccatgcaacgtaagttggaaaagatggctgatcaagctatgacccaaatgtataaacaggctagatctgaggacaagagggcaaaagttactagtgctatgcagacaatgcttttcactatgcttagaaagttggataatgatgcactcaacaacattatcaacaatgcaagagatggttgtgttcccttgaacataatacctcttacaacagcagccaaactaatggttgtcataccagactataacacatataaaaatacgtgtgatggtacaacatttacttatgcatcagcattgtgggaaatccaacaggttgtagatgcagatagtaaaattgttcaacttagtgaaattagtatggacaattcacctaatttagcatggcctcttattgtaacagctttaagggccaattctgctgtcaaattacagaataatgagcttagtcctgttgcactacgacagatgtcttgtgctgccggtactacacaaactgcttgcactgatgacaatgcgttagcttactacaacacaacaaagggaggtaggtttgtacttgcactgttatccgatttacaggatttgaaatgggctagattccctaagagtgatggaactggtactatctatacagaactggaaccaccttgtaggtttgttacagacacacctaaaggtcctaaagtgaagtatttatactttattaaaggattaaacaacctaaatagaggtatggtacttggtagtttagctgccacagtacgtctacaagctggtaatgcaacagaagtgcctgccaattcaactgtattatctttctgtgcttttgctgtagatgctgctaaagcttacaaagattatctagctagtgggggacaaccaatcactaattgtgttaagatgttgtgtacacacactggtactggtcaggcaataacagttacaccggaagccaatatggatcaagaatcctttggtggtgcatcgtgttgtctgtactgccgttgccacatagatcatccaaatcctaaaggattttgtgacttaaaaggtaagtatgtacaaatacctacaacttgtgctaatgaccctgtgggttttacacttaaaaacacagtctgtaccgtctgcggtatgtggaaaggttatggctgtagttgtgatcaactccgcgaacccatgcttcagtcagctgatgcacaatcgtttttaaacgggtttgcggtgtaagtgcagcccgtcttacaccgtgcggcacaggcactagtactgatgtcgtatacagggcttttgacatctacaatgataaagtagctggttttgctaaattcctaaaaactaattgttgtcgcttccaagaaaaggacgaagatgacaatttaattgattcttactttgtagttaagagacacactttctctaactaccaacatgaagaaacaatttataatttacttaaggattgtccagctgttgctaaacatgacttctttaagtttagaatagacggtgacatggtaccacatatatcacgtcaacgtcttactaaatacacaatggcagacctcgtctatgctttaaggcattttgatgaaggtaattgtgacacattaaaagaaatacttgtcacatacaattgttgtgatgatgattatttcaataaaaaggactggtatgattttgtagaaaacccagatatattacgcgtatacgccaacttaggtgaacgtgtacgccaagctttgttaaaaacagtacaattctgtgatgccatgcgaaatgctggtattgttggtgtactgacattagataatcaagatctcaatggtaactggtatgatttcggtgatttcatacaaaccacgccaggtagtggagttcctgttgtagattcttattattcattgttaatgcctatattaaccttgaccagggctttaactgcagagtcacatgttgacactgacttaacaaagccttacattaagtgggatttgttaaaatatgacttcacggaagagaggttaaaactctttgaccgttattttaaatattgggatcagacataccacccaaattgtgttaactgtttggatgacagatgcattctgcattgtgcaaactttaatgttttattctctacagtgttcccacttacaagttttggaccactagtgagaaaaatatttgttgatggtgttccatttgtagtttcaactggataccacttcagagagctaggtgttgtacataatcaggatgtaaacttacatagctctagacttagttttaaggaattacttgtgtatgctgctgaccctgctatgcacgctgcttctggtaatctattactagataaacgcactacgtgcttttcagtagctgcacttactaacaatgttgcttttcaaactgtcaaacctggtaattttaacaaagacttctatgactttgctgtgtctaagggtttctttaaggaaggaagttctgttgaattaaaacacttcttctttgctcaggatggtaatgctgctatcagcgattatgactactatcgttataatctaccaacaatgtgtgatatcagacaactactatttgtagttgaagttgttgataagtactttgattgttacgatggtggctgtattaatgctaaccaagtcatcgtcaacaacctagacaaatcagctggttttccatttaataaatggggtaaggctagactttattatgattcaatgagttatgaggatcaagatgcacttttcgcatatacaaaacgtaatgtcatccctactataactcaaatgaatcttaagtatgccattagtgcaaagaatagagctcgcaccgtagctggtgtctctatctgtagtactatgaccaatagacagtttcatcaaaaattattgaaatcaatagccgccactagaggagctactgtagtaattggaacaagcaaattctatggtggttggcacaacatgttaaaaactgtttatagtgatgtagaaaaccctcatcttatgggttgggattatcctaaatgtgatagagccatgcctaacatgcttagaattatggcctcacttgttcttgctcgcaaacatacaacgtgttgtagcttgtcacaccgtttctatagattagctaatgagtgtgctcaagtattgagtgaaatggtcatgtgtggcggttcactatatgttaaaccaggtggaacctcatcaggagatgccacaactgcttatgctaatagtgtttttaacatttgtcaagctgtcacggccaatgttaatgcacttttatctactgatggtaacaaaattgccgataagtatgtccgcaatttacaacacagactttatgagtgtctctatagaaatagagatgttgacacagactttgtgaatgagttttacgcatatttgcgtaaacatttctcaatgatgatactctctgacgatgctgttgtgtgtttcaatagcacttatgcatctcaaggtctagtggctagcataaagaactttaagtcagttctttattatcaaaacaatgtttttatgtctgaagcaaaatgttggactgagactgaccttactaaaggacctcatgaattttgctctcaacatacaatgctagttaaacagggtgatgattatgtgtaccttccttacccagatccatcaagaatcctaggggccggctgttttgtagatgatatcgtaaaaacagatggtacacttatgattgaacggttcgtgtctttagctatagatgcttacccacttactaaacatcctaatcaggagtatgctgatgtctttcatttgtacttacaatacataagaaagctacatgatgagttaacaggacacatgttagacatgtattctgttatgcttactaatgataacacctcaaggtattgggaacctgagttttatgaggctatgtacacaccgcatacagtcttacaggctgttggggcttgtgttctttgcaattcacagacttcattaagatgtggtgcttgcatacgtagaccattcttatgttgtaaatgctgttacgaccatgtcatatcaacatcacataaattagtcttgtctgttaatccgtatgtttgcaatgctccaggttgtgatgtcacagatgtgactcaactttacttaggaggtatgagctattattgtaaatcacataaaccacccattagttttccattgtgtgctaatggacaagtttttggtttatataaaaatacatgtgttggtagcgataatgttactgactttaatgcaattgcaacatgtgactggacaaatgctggtgattacattttagctaacacctgtactgaaagactcaagctttttgcagcagaaacgctcaaagctactgaggagacatttaaactgtcttatggtattgctactgtacgtgaagtgctgtctgacagagaattacatctttcatgggaagttggtaaacctagaccaccacttaaccgaaattatgtctttactggttatcgtgtaactaaaaacagtaaagtacaaataggagagtacacctttgaaaaaggtgactatggtgatgctgttgtttaccgaggtacaacaacttacaaattaaatgttggtgattattttgtgctgacatcacatacagtaatgccattaagtgcacctacactagtgccacaagagcactatgttagaattactggcttatacccaacactcaatatctcagatgagttttctagcaatgttgcaaattatcaaaaggttggtatgcaaaagtattctacactccagggaccacctggtactggtaagagtcattttgctattggcctagctctctactacccttctgctcgcatagtgtatacagcttgctctcatgccgctgttgatgcactatgtgagaaggcattaaaatatttgcctatagataaatgtagtagaattatacctgcacgtgctcgtgtagagtgttttgataaattcaaagtgaattcaacattagaacagtatgtcttttgtactgtaaatgcattgcctgagacgacagcagatatagttgtctttgatgaaatttcaatggccacaaattatgatttgagtgttgtcaatgccagattacgtgctaagcactatgtgtacattggcgaccctgctcaattacctgcaccacgcacattgctaactaagggcacactagaaccagaatatttcaattcagtgtgtagacttatgaaaactataggtccagacatgttcctcggaacttgtcggcgttgtcctgctgaaattgttgacactgtgagtgctttggtttatgataataggcttaaagcacataaagacaaatcagctcaatgctttaaaatgttttataagggtgttatcacgcatgatgtttcatctgcaattaacaggccacaaataggcgtggtaagagaattccttacacgtaaccctgcttggagaaaagctgtctttatttcaccttataattcacagaatgctgtagcctcaaagattttgggactaccaactcaaactgttgattcatcacagggctcagaatatgactatgtcatattcactcaaaccactgaaacagctcactcttgtaatgtaaacagatttaatgttgctattaccagagcaaaagtaggcatactttgcataatgtctgatagagacctttatgacaagttgcaatttacaagtcttgaaattccacgtaggaatgtggcaactttacaagctgaaaatgtaacaggactctttaaagattgtagtaaggtaatcactgggttacatcctacacaggcacctacacacctcagtgttgacactaaattcaaaactgaaggtttatgtgttgacatacctggcatacctaaggacatgacctatagaagactcatctctatgatgggttttaaaatgaattatcaagttaatggttaccctaacatgtttatcacccgcgaagaagctataagacatgtacgtgcatggattggcttcgatgtcgaggggtgtcatgctactagagaagctgttggtaccaatttacctttacagctaggtttttctacaggtgttaacctagttgctgtacctacaggttatgttgatacacctaataatacagatttttccagagttagtgctaaaccaccgcctggagatcaatttaaacacctcataccacttatgtacaaaggacttccttggaatgtagtgcgtataaagattgtacaaatgttaagtgacacacttaaaaatctctctgacagagtcgtatttgtcttatgggcacatggctttgagttgacatctatgaagtattttgtgaaaataggacctgagcgcacctgttgtctatgtgatagacgtgccacatgcttttccactgcttcagacacttatgcctgttggcatcattctattggatttgattacgtctataatccgtttatgattgatgttcaacaatggggttttacaggtaacctacaaagcaaccatgatctgtattgtcaagtccatggtaatgcacatgtagctagttgtgatgcaatcatgactaggtgtctagctgtccacgagtgctttgttaagcgtgttgactggactattgaatatcctataattggtgatgaactgaagattaatgcggcttgtagaaaggttcaacacatggttgttaaagctgcattattagcagacaaattcccagttcttcacgacattggtaaccctaaagctattaagtgtgtacctcaagctgatgtaggatggaagttctatgatgcacagccttgtagtgacaaagcttataaaatagaagaattattctattcttatgccacacattctgacaaattcacagatggtgtatgcctattttggaattgcaatgtcgatagatatcctgctaattccattgtttgtagatttgacactagagtgctatctaaccttaacttgcctggttgtgatggtggcagtttgtatgtaaataaacatgcattccacacaccagcttttgataaaagtgcttttgttaatttaaaacaattaccatttttctattactctgacagtccatgtgagtctcatggaaaacaagtagtgtcagatatagattatgtaccactaaagtctgctacgtgtataacacgttgcaatttaggtggtgctgtctgtagacatcatgctaatgagtacagattgtatctcgatgcttataacatgatgatctcagctggctttagcttgtgggtttacaaacaatttgatacttataacctctggaacacttttacaagacttcagagtttagaaaatgtggcttttaatgttgtaaataagggacactttgatggacaacagggtgaagtaccagtttctatcattaataacactgtttacacaaaagttgatggtgttgatgtagaattgtttgaaaataaaacaacattacctgttaatgtagcatttgagctttgggctaagcgcaacattaaaccagtaccagaggtgaaaatactcaataatttgggtgtggatattgctgctaatactgtgatctgggactacaaaagagatgctccagcacatatatctactattggtgtttgttctatgactgacatagccaagaaaccaactgaaacgatttgtgcaccactcactgtcttttttgatggtagagttgatggtcaagtagacttatttagaaatgcccgtaatggtgttcttattacagaaggtagtgttaaaggtttacaaccatctgtaggtcccaaacaagctagtcttaatggagtcacattaattggagaagccgtaaaaacacagttcaattattataagaaagttgatggtgttgtccaacaattacctgaaacttactttactcagagtagaaatttacaagaatttaaacccaggagtcaaatggaaattgatttcttagaattagctatggatgaattcattgaacggtataaattagaaggctatgccttcgaacatatcgtttatggagattttagtcatagtcagttaggtggtttacatctactgattggactagctaaacgttttaaggaatcaccttttgaattagaagattttattcctatggacagtacagttaaaaactatttcataacagatgcgcaaacaggttcatctaagtgtgtgtgttctgttattgatttattacttgatgattttgttgaaataataaaatcccaagatttatctgtagtttctaaggttgtcaaagtgactattgactatacagaaatttcatttatgctttgtgtaaagatggccatgtagaaacattttacccaaaattacaatctagtcaagcgtggcaaccgggtgttgctatgcctaatctttacaaaatgcaaagaatgctattagaaaagtgtgaccttcaaaattatggtgatagtgcaacattacctaaaggcataatgatgaatgtcgcaaaatatactcaactgtgtcaatatttaaacacattaacattagctgtaccctataatatgagagttatacattttggtgctggttctgataaaggagttgcaccaggtacagctgttttaagacagtggttgcctacgggtacgctgcttgtcgattcagatcttaatgactttgtctctgatgcagattcaactttgattggtgattgtgcaactgtacatacagctaataaatgggatctcattattagtgatatgtacgaccctaagactaaaaatgttacaaaagaaaatgactctaaagagggttttttcacttacatttgtgggtttatacaacaaaagctagctcttggaggttccgtggctataaagataacagaacattcttggaatgctgatctttataagctcatgggacacttcgcatggtggacagcctttgttactaatgtgaatgcgtcatcatctgaagcatttttaattggatgtaattatcttggcaaaccacgcgaacaaatagatggttatgtcatgcatgcaaattacatattttggaggaatacaaatccaattcagttgtcttcctattctttatttgacatgagtaaatttccccttaaattaaggggtactgctgttatgtctttaaaagaaggtcaaatcaatgatatgattttatctcttcttagtaaaggtagacttataattagagaaaacaacagagttgttatttctagtgatgttcttgttaacaactaaacgaacaatgtttgtttttcttgttttattgccactagtctctagtcagtgtgttaatcttacaaccagaactcaattaccccctgcatacactaattctttcacacgtggtgtttattaccctgacaaagttttcagatcctcagttttacattcaactcaggacttgttcttacctttcttttccaatgttacttggttccatgctatctctgggaccaatggtactaagaggtttgataaccctgtcctaccatttaatgatggtgtttattttgcttccactgagaagtctaacataataagaggctggatttttggtactactttagattcgaagacccagtccctacttattgttaataacgctactaatgttgttattaaagtctgtgaatttcaattttgtaatgatccatttttgggtgtttaccacaaaaacaacaaaagttggatggaaagtgagttcagagtttattctagtgcgaataattgcacttttgaatatgtctctcagccttttcttatggaccttgaaggaaaacagggtaatttcaaaaatcttagggaatttgtgtttaagaatattgatggttattttaaaatatattctaagcacacgcctattaatttagtgcgtgatctccctcagggtttttcggctttagaaccattggtagatttgccaataggtattaacatcactaggtttcaaactttacttgctttacatagaagttatttgactcctggtgattcttcttcaggttggacagctggtgctgcagcttattatgtgggttatcttcaacctaggacttttctattaaaatataatgaaaatggaaccattacagatgctgtagactgtgcacttgaccctctctcagaaacaaagtgtacgttgaaatccttcactgtagaaaaaggaatctatcaaacttctaactttagagtccaaccaacagaatctattgttagatttcctaatattacaaacttgtgcccttttggtgaagtttttaacgccaccagatttgcatctgtttatgcttggaacaggaagagaatcagcaactgtgttgctgattattctgtcctatataattccgcatcattttccacttttaagtgttatggagtgtctcctactaaattaaatgatctctgctttactaatgtctatgcagattcatttgtaattagaggtgatgaagtcagacaaatcgctccagggcaaactggaaagattgctgattataattataaattaccagatgattttacaggctgcgttatagcttggaattctaacaatcttgattctaaggttggtggtaattataattacctgtatagattgtttaggaagtctaatctcaaaccttttgagagagatatttcaactgaaatctatcaggccggtagcacaccttgtaatggtgttgaaggttttaattgttactttcctttacaatcatatggtttccaacccacttatggtgttggttaccaaccatacagagtagtagtactttcttttgaacttctacatgcaccagcaactgtttgtggacctaaaaagtctactaatttggttaaaaacaaatgtgtcaatttcaacttcaatggtttaacaggcacaggtgttcttactgagtctaacaaaaagtttctgcctttccaacaatttggcagagacattgatgacactactgatgctgtccgtgatccacagacacttgagattcttgacattacaccatgttcttttggtggtgtcagtgttataacaccaggaacaaatacttctaaccaggttgctgttctttatcagggtgttaactgcacagaagtccctgttgctattcatgcagatcaacttactcctacttggcgtgtttattctacaggttctaatgtttttcaaacacgtgcaggctgtttaataggggctgaacatgtcaacaactcatatgagtgtgacatacccattggtgcaggtatatgcgctagttatcagactcagactaattctcatcggcgggcacgtagtgtagctagtcaatccatcattgcctacactatgtcacttggtgcagaaaattcagttgcttactctaataactctattgccatacccataaattttactattagtgttaccacagaaattctaccagtgtctatgaccaagacatcagtagattgtacaatgtacatttgtggtgattcaactgaatgcagcaatcttttgttgcaatatggcagtttttgtacacaattaaaccgtgctttaactggaatagctgttgaacaagacaaaaacacccaagaagtttttgcacaagtcaaacaaatttacaaaacaccaccaattaaagattttggtggttttaatttttcacaaatattaccagatccatcaaaaccaagcaagaggtcatttattgaagatctacttttcaacaaagtgacacttgcagatgctggcttcatcaaacaatatggtgattgccttggtgatattgctgctagagacctcatttgtgcacaaaagtttaacggccttactgttttgccacctttgctcacagatgaaatgattgctcaatacacttctgcactgttagcgggtacaatcacttctggttggacctttggtgcaggtgctgcattacaaataccatttgctatgcaaatggcttataggtttaatggtattggagttacacagaatgttctctatgagaaccaaaaattgattgccaaccaatttaatagtgctattggcaaaattcaagactcactttcttccacagcaagtgcacttggaaaacttcaagatgtggtcaaccaaaatgcacaagctttaaacacgcttgttaaacaacttagctccaattttggtgcaatttcaagtgttttaaatgatatccttgcacgtcttgacaaagttgaggctgaagtgcaaattgataggttgatcacaggcagacttcaaagtttgcagacatatgtgactcaacaattaattagagctgcagaaatcagagcttctgctaatcttgctgctactaaaatgtcagagtgtgtacttggacaatcaaaaagagttgatttttgtggaaagggctatcatcttatgtccttccctcagtcagcacctcatggtgtagtcttcttgcatgtgacttatgtccctgcacaagaaaagaacttcacaactgctcctgccatttgtcatgatggaaaagcacactttcctcgtgaaggtgtctttgtttcaaatggcacacactggtttgtaacacaaaggaatttttatgaaccacaaatcattactacacacaacacatttgtgtctggtaactgtgatgttgtaataggaattgtcaacaacacagtttatgatcctttgcaacctgaattagactcattcaaggaggagttagataaatattttaagaatcatacatcaccagatgttgatttaggtgacatctctggcattaatgcttcagttgtaaacattcaaaaagaaattgaccgcctcaatgaggttgccaagaatttaaatgaatctctcatcgatctccaagaacttggaaagtatgagcagtatataaaatggccatggtacatttggctaggttttatagctggcttgattgccatagtaatggtgacaattatgctttgctgtatgaccagttgctgtagttgtctcaagggctgttgttcttgtggatcctgctgcaaatttgatgaagacgactctgagccagtgctcaaaggagtcaaattacattacacataaacgaacttatggatttgtttatgagaatcttcacaattggaactgtaactttgaagcaaggtgaaatcaaggatgctactccttcagattttgttcgcgctactgcaacgataccgatacaagcctcactccctttcggatggcttattgttggcgttgcacttcttgctgtttttcagagcgcttccaaaatcataaccctcaaaaagagatggcaactagcactctccaagggtgttcactttgtttgcaacttgctgttgttgtttgtaacagtttactcacaccttttgctcgttgctgctggccttgaagccccttttctctatctttatgctttagtctacttcttgcagagtataaactttgtaagaataataatgaggctttggctttgctggaaatgccgttccaaaaacccattactttatgatgccaactattttctttgctggcatactaattgttacgactattgtataccttacaatagtgtaacttcttcaattgtcattacttcaggtgatggcacaacaagtcctatttctgaacatgactaccagattggtggttatactgaaaaatgggaatctggagtaaaagactgtgttgtattacacagttacttcacttcagactattaccagctgtactcaactcaattgagtacagacactggtgttgaacatgttaccttcttcatctacaataaaattgttgatgagcctgaagaacatgtccaaattcacacaatcgacggttcatccggagttgttaatccagtaatggaaccaatttatgatgaaccgacgacgactactagcgtgcctttgtaagcacaagctgatgagtacgaacttatgtactcattcgtttcggaagagacaggtacgttaatagttaatagcgtacttctttttcttgctttcgtggtattcttgctagttacactagccatccttactgcgcttcgattgtgtgcgtactgctgcaatattgttaacgtgagtcttgtaaaaccttctttttacgtttactctcgtgttaaaaatctgaattcttctagagttcctgatcttctggtctaaacgaactaaatattatattagtttttctgtttggaactttaattttagccatggcagattccaacggtactattaccgttgaagagcttaaaaagctccttgaacaatggaacctagtaataggtttcctattccttacatggatttgtcttctacaatttgcctatgccaacaggaataggtttttgtatataattaagttaattttcctctggctgttatggccagtaactttagcttgttttgtgcttgctgctgtttacagaataaattggatcaccggtggaattgctatcgcaatggcttgtcttgtaggcttgatgtggctcagctacttcattgcttctttcagactgtttgcgcgtacgcgttccatgtggtcattcaatccagaaactaacattcttctcaacgtgccactccatggcactattctgaccagaccgcttctagaaagtgaactcgtaatcggagctgtgatccttcgtggacatcttcgtattgctggacaccatctaggacgctgtgacatcaaggacctgcctaaagaaatcactgttgctacatcacgaacgctttcttattacaaattgggagcttcgcagcgtgtagcaggtgactcaggttttgctgcatacagtcgctacaggattggcaactataaattaaacacagaccattccagtagcagtgacaatattgctttgcttgtacagtaagtgacaacagatgtttcatctcgttgactttcaggttactatagcagagatattactaattattatgaggacttttaaagtttccatttggaatcttgattacatcataaacctcataattaaaaatttatctaagtcactaactgagaataaatattctcaattagatgaagagcaaccaatggagattgattaaacgaacatgaaaattattcttttcttggcactgataacactcgctacttgtgagctttatcactaccaagagtgtgttagaggtacaacagtacttttaaaagaaccttgctcttctggaacatacgagggcaattcaccatttcatcctctagctgataacaaatttgcactgacttgctttagcactcaatttgcttttgcttgtcctgacggcgtaaaacacgtctatcagttacgtgccagatcagtttcacctaaactgttcatcagacaagaggaagttcaagaactttactctccaatttttcttattgttgcggcaatagtgtttataacactttgcttcacactcaaaagaaagacagaatgattgaactttcattaattgacttctatttgtgctttttagcctttctgctattccttgttttaattatgcttattatcttttggttctcacttgaactgcaagatcataatgaaacttgtcacgcctaaacgaacatgaaatttcttgttttcttaggaatcatcacaactgtagctgcatttcaccaagaatgtagtttacagtcatgtacttaacatcaaccatatgtagttgatgacccgtgtcctattcacttctattctaaatggtatattagagtaggagctataaaatcagcacctttaattgaattgtgcgtggatgaggctggttctaaatcacccattcagtgcatcgatatcggtaattatacagtttcctgtttaccttttacaattaattgccaggaacctaaattgggtagtcttgtagtgcgttgttcgttctatgaagactttttagagtatcatgacgttcgtgttgttttagatttcatctaaacgaacaaactaaatgtctctaaatggaccccaaaatcagcgaaatgcaccccgcattacgtttggtggaccctcagattcaactggcagtaaccagaatggagaacgcagtggggcgcgatcaaaacaacgtcggccccaaggtttacccaataatactgcgtcttggttcaccgctctcactcaacatggcaaggaagaccttaaattccctcgaggacaaggcgttccaattaacaccaatagcagtccagatgaccaaattggctactaccgaagagctaccagacgaattcgtggtggtgacggtaaaatgaaagatctcagtccaagatggtatttctactacctaggaactgggccagaagctggacttccctatggtgctaacaaagacggcatcatatgggttgcaactgagggagccttgaatacaccaaaagatcacattggcacccgcaatcctgctaacaatgctgcaatcgtgctacaacttcctcaaggaacaacattgccaaaaggcttctacgcagaagggagcagaggcggcagtcaagcctcttctcgttcctcatcacgtagtcgcaacagttcaagaaattcaactccaggcagcagtaaacgaacttctcctgctagaatggctggcaatggcggtgatgctgctcttgctttgctgctgcttgacagattgaaccagcttgagagcaaaatgtttggtaaaggccaacaacaacaaggccaaactgtcactaagaaatctgctgctgaggcttctaagaagcctcggcaaaaacgtactgccactaaagcatacaatgtaacacaagctttcggcagacgtggtccagaacaaacccaaggaaattttggggaccaggaactaatcagacaaggaactgattacaaacattggccgcaaattgcacaatttgcccccagcgcttcagcgttcttcggaatgtcgcgcattggcatggaagtcacaccttcgggaacgtggttgacctacacaggtgccatcaaattggatgacaaagatccaaatttcaaagatcaagtcattttgctgaataagcatattgacgcatacaaaacattcccaccaacagagcctaaaaaggacaaaaagaagaaggctgatgaaactcaagccttaccgcagagacagaagaaacagcaaactgtgactcttcttcctgctgcagatttggatgatttctccaaacaattgcaacaatccatgagcagtgctgactcaactcaggcctaaactcatgcagaccacacaaggcagatgggctatataaacgttttcgcttttccgtttacgatatatagtctactcttgtgcagaatgaattctcgtaactacatagcacaagtagatgtagttaactttaatctcacatagcaatctttaatcagtgtgtaacattagggaggacttgaaagagccaccacattttcaccgaggccacgcggagtacgatcgagtgtacagtgaacaatgctagggagagctgcctatatggaagagccctaatgtgtaaaattaattttagtagtgctatccccatgtgattttaatagcttcttaggagaatgnnnnnnnnnnnnnnnnnnnnnnnnnnnnnnnnnnn

SEQ ID NO: 23 - protein, 1270 aa, SARS-CoV2
MFVFLVLLPLVSSQCVNLTTRTQLPPAYTNSFTRGVYYPDKVFRSSVLHSTQDLFLPFFSNVTWFHAISGTNGTKRFDNPVLPFNDGVYFASTEKSNIIRGWIFGTTLDSKTQSLLIVNNATNVVIKVCEFQFCNDPFLGVYHKNNKSWMESEFRVYSSANNCTFEYVSQPFLMDLEGKQGNFKNLREFVFKNIDGYFKIYSKHTPINLVRDLPQGFSALEPLVDLPIGINITRFQTLLALHRSYLTPGDSSSGWTAGAAAYYVGYLQPRTFLLKYNENGTITDAVDCALDPLSETKCTLKSFTVEKGIYQTSNFRVQPTESIVRFPNITNLCPFGEVFNATRFASVYAWNRKRISNCVADYSVLYNSASFSTFKCYGVSPTKLNDLCFTNVYADSFVIRGDEVRQIAPGQTGKIADYNYKLPDDFTGCVIAWNSNNLDSKVGGNYNYLYRLFRKSNLKPFERDISTEIYQAGSTPCNGVEGFNCYFPLQSYGFQPTYGVGYQPYRVVVLSFELLHAPATVCGPKKSTNLVKNKCVNFNFNGLTGTGVLTESNKKFLPFQQFGRDIDDTTDAVRDPQTLEILDITPCSFGGVSVITPGTNTSNQVAVLYQGVNCTEVPVAIHADQLTPTWRVYSTGSNVFQTRAGCLIGAEHVNNSYECDIPIGAGICASYQTQTNSHRRARSVASQSIIAYTMSLGAENSVAYSNNSIAIPINFTISVTTEILPVSMTKTSVDCTMYICGDSTECSNLLLQYGSFCTQLNRALTGIAVEQDKNTQEVFAQVKQIYKTPPIKDFGGFNFSQILPDPSKPSKRSFIEDLLFNKVTLADAGFIKQYGDCLGDIAARDLICAQKFNGLTVLPPLLTDEMIAQYTSALLAGTITSGWTFGAGAALQIPFAMQMAYRFNGIGVTQNVLYENQKLIANQFNSAIGKIQDSLSSTASALGKLQDVVNQNAQALNTLVKQLSSNFGAISSVLNDILARLDKVEAEVQIDRLITGRLQSLQTYVTQQLIRAAEIRASANLAATKMSECVLGQSKRVDFCGKGYHLMSFPQSAPHGVVFLHVTYVPAQEKNFTTAPAICHDGKAHFPREGVFVSNGTHWFVTQRNFYEPQIITTHNTFVSGNCDVVIGIVNNTVYDPLQPELDSFKEELDKYFKNHTSPDVDLGDISGINASVVNIQKEIDRLNEVAKNLNESLIDLQELGKYEQYIKWPWYIWLGFIAGLIAIVMVTIMLCCMTSCCSCLKGCCSCGSCCKFDEDDSEPVLKGVKLHYT

SEQ ID NO: 24 - DNA, 29832 bp, SARS-CoV2
aaggtttataccttcccaggtaacaaaccaaccaactttcgatctcttgtagatctgttctctaaacgaactttaaaatctgtgtggctgtcactcggctgcatgcttagtgcactcacgcagtataattaataactaattactgtcgttgacaggacacgagtaactcgtctatcttctgcaggctgcttacggtttcgtccgtgttgcagccgatcatcagcacatctaggttttgtccgggtgtgaccgaaaggtaagatggagagccttgtccctggtttcaacgagaaaacacacgtccaactcagtttgcctgttttacaggttcgcgacgtgctcgtacgtggctttggagactccgtggaggaggtcttatcagaggcacgtcaacatcttaaagatggcacttgtggcttagtagaagttgaaaaaggcgttttgcctcaacttgaacagccctatgtgttcatcaaacgttcggatgctcgaactgcacctcatggtcatgttatggttgagctggtagcagaactcgaaggcattcagtacggtcgtagtggtgagacacttggtgtccttgtccctcatgtgggcgaaataccagtggcttaccgcaaggttcttcttcgtaagaacggtaataaaggagctggtggccatagttacggcgccgatctaaagtcatttgacttaggcgacgagcttggcactgatccttatgaagattttcaagaaaactggaacactaaacatagcagtggtgttacccgtgaactcatgcgtgagcttaacggaggggcatacactcgctatgtcgataacaacttctgtggccctgatggctaccctcttgagtgcattaaagaccttctagcacgtgctggtaaagcttcatgcactttgtccgaacaactggactttattgacactaagaggggtgtatactgctgccgtgaacatgagcatgaaattgcttggtacacggaacgttctgaaaagagctatgaattgcagacaccttttgaaattaaattggcaaagaaatttgacatcttcaatggggaatgtccaaattttgtatttcccttaaattccataatcaagactattcaaccaagggttgaaaagaaaaagcttgatggctttatgggtagaattcgatctgtctatccagttgcgtcaccaaatgaatgcaaccaaatgtgcctttcaactctcatgaagtgtgatcattgtggtgaaacttcatggcagacgggcgattttgttaaagccacttgcgaattttgtggcactgagaatttgactaaagaaggtgccactacttgtggttacttaccccaaaatgctgttgttaaaatttattgtccagcatgtcacaattcagaagtaggacctgagcatagtcttgccgaataccataatgaatctggcttgaaaaccattcttcgtaagggtggtcgcactattgcctttggaggctgtgtgttctcttatgttggttgccataacaagtgtgcctattgggttccacgtgctagcgctaacataggttgtaaccatacaggtgttgttggagaaggttccgaaggtcttaatgacaaccttcttgaaatactccaaaaagagaaagtcaacatcaatattgttggtgactttaaacttaatgaagagatcgccattattttggcatctttttctgcttccacaagtgcttttgtggaaactgtgaaaggtttggattataaagcattcaaacaaattgttgaatcctgtggtaattttaaagttacaaaaggaaaagctaaaaaaggtgcctggaatattggtgaacagaaatcaatactgagtcctctttatgcatttgcatcagaggctgctcgtgttgtacgatcaattttctcccgcactcttgaaactgctcaaaattctgtgcgtgttttacagaaggccgctataacaatactagatggaatttcacagtattcactgagactcattgatgctatgatgttcacatctgatttggctactaacaatctagttgtaatggcctacattacaggtggtgttgttcagttgacttcgcagtggctaactaacatctttggcactgtttatgaaaaactcaaacccgtccttgattggcttgaagagaagtttaaggaaggtgtagagtttcttagagacggttgggaaattgttaaatttatctcaacctgtgcttgtgaaattgtcggtggacaaattgtcacctgtgcaaaggaaattaaggagagtgttcagacattctttaagcttgtaaataaatttttggctttgtgtgctgactctatcattattggtggagctaaacttaaagccttgaatttaggtgaaacatttgtcacgcactcaaagggattgtacagaaagtgtgttaaatccagagaagaaactggcctactcatgcctctaaaagccccaaaagaaattatcttcttagagggagaaacacttcccacagaagtgttaacagaggaagttgtcttgaaaactggtgatttacaaccattagaacaacctactagtgaagctgttgaagctccattggttggtacaccagtttgtattaacgggcttatgttgctcgaaatcaaagacacagaaaagtactgtgcccttgcacctaatatgatggtaacaaacaataccttcacactcaaaggcggtgcaccaacaaaggttacttttggtgatgacactgtgatagaagtgcaaggttacaagagtgtgaatatcacttttgaacttgatgaaaggattgataaagtacttaatgagaagtgctctgcctatacagttgaactcggtacagaagtaaatgagttcgcctgtgttgtggcagatgctgtcataaaaactttgcaaccagtatctgaattacttacaccactgggcattgatttagatgagtggagtatggctacatactacttatttgatgagtctggtgagtttaaattggcttcacatatgtattgttctttttaccctccagatgaggatgaagaagaaggtgattgtgaagaagaagagtttgagccatcaactcaatatgagtatggtactgaagatgattaccaaggtaaacctttggaatttggtgccacttctgctgctcttcaacctgaagaagagcaagaagaagattggttagatgatgatagtcaacaaactgttggtcaacaagacggcagtgaggacaatcagacaactactattcaaacaattgttgaggttcaacctcaattagagatggaacttacaccagttgttcagactattgaagtgaatagttttagtggttatttaaaacttactgacaatgtatacattaaaaatgcagacattgtggaagaagctaaaaaggtaaaaccaacagtggttgttaatgcagccaatgtttaccttaaacatggaggaggtgttgcaggagccttaaataaggctactaacaatgccatgcaagttgaatctgatgattacatagctactaatggaccacttaaagtgggtggtagttgtgttttaagcggacacaatcttgctaaacactgtcttcatgttgtcggcccaaatgttaacaaaggtgaagacattcaacttcttaagagtgcttatgaaaattttaatcagcacgaagttctacttgcaccattattatcagctggtatttttggtgctgaccctatacattctttaagagtttgtgtagatactgttcgcacaaatgtctacttagctgtctttgataaaaatctctatgacaaacttgtttcaagctttttggaaatgaagagtgaaaagcaagttgaacaaaagatcgctgagattcctaaagaggaagttaagccatttataactgaaagtaaaccttcagttgaacagagaaaacaagatgataagaaaatcaaagcttgtgttgaagaagttacaacaactctggaagaaactaagttcctcacagaaaacttgttactttatattgacattaatggcaatcttcatccagattctgccactcttgttagtgacattgacatcactttcttaaagaaagatgctccatatatagtgggtgatgttgttcaagagggtgttttaactgctgtggttatacctactaaaaaggctggtggcactactgaaatgctagcgaaagctttgagaaaagtgccaacagacaattatataaccacttacccgggtcagggtttaaatggttacactgtagaggaggcaaagacagtgcttaaaaagtgtaaaagtgccttttacattctaccatctattatctctaatgagaagcaagaaattcttggaactgtttcttggaatttgcgagaaatgcttgcacatgcagaagaaacacgcaaattaatgcctgtctgtgtggaaactaaagccatagtttcaactatacagcgtaaatataagggtattaaaatacaagagggtgtggttgattatggtgctagattttacttttacaccagtaaaacaactgtagcgtcacttatcaacacacttaacgatctaaatgaaactcttgttacaatgccacttggctatgtaacacatggcttaaatttggaagaagctgctcggtatatgagatctctcaaagtgccagctacagtttctgtttcttcacctgatgctgttacagcgtataatggttatcttacttcttcttctaaaacacctgaagaacattttattgaaaccatctcacttgctggttcctataaagattggtcctattctggacaatctacacaactaggtatagaatttcttaagagaggtgataaaagtgtatattacactagtaatcctaccacattccacctagatggtgaagttatcacctttgacaatcttaagacacttctttctttgagagaagtgaggactattaaggtgtttacaacagtagacaacattaacctccacacgcaagttgtggacatgtcaatgacatatggacaacagtttggtccaacttatttggatggagctgatgttactaaaataaaacctcataattcacatgaaggtaaaacattttatgttttacctaatgatgacactctacgtgttgaggcttttgagtactaccacacaactgatcctagttttctgggtaggtacatgtcagcattaaatcacactaaaaagtggaaatacccacaagttaatggtttaacttctattaaatgggcagataacaactgttatcttgccactgcattgttaacactccaacaaatagagttgaagtttaatccacctgctctacaagatgcttattacagagcaagggctggtgaagctgctaacttttgtgcacttatcttagcctactgtaataagacagtaggtgagttaggtgatgttagagaaacaatgagttacttgtttcaacatgccaatttagattcttgcaaaagagtcttgaacgtggtgtgtaaaacttgtggacaacagcagacaacccttaagggtgtagaagctgttatgtacatgggcacactttcttatgaacaatttaagaaaggtgttcagataccttgtacgtgtggtaaacaagctacaaaatatctagtacaacaggagtcaccttttgttatgatgtcagcaccacctgctcagtatgaacttaagcatggtacatttacttgtgctagtgagtacactggtaattaccagtgtggtcactataaacatataacttctaaagaaactttgtattgcatagacggtgctttacttacaaagtcctcagaatacaaaggtcctattacggatgttttctacaaagaaaacagttacacaacaaccataaaaccagttacttataaattggatggtgttgtttgtacagaaattgaccctaagttggacaattattataagaaagacaattcttatttcacagagcaaccaattgatcttgtaccaaaccaaccatatccaaacgcaagcttcgataattttaagtttgtatgtgataatatcaaatttgctgatgatttaaaccagttaactggttataagaaacctgcttcaagagagcttaaagttacatttttccctgacttaaatggtgatgtggtggctattgattataaacactacacaccctcttttaagaaaggagctaaattgttacataaacctattgtttggcatgttaacaatgcaactaataaagccacgtataaaccaaatacctggtgtatacgttgtctttggagcacaaaaccagttgaaacatcaaattcgtttgatgtactgaagtcagaggacgcgcagggaatggataatcttgtctgcgaagatctaaaaccagtctctgaagaagtagtggaaaatcctaccatacagaaagacgttcttgagtgtaatgtgaaaactaccgaagttgtaggagacattatacttaaaccagcaaataatagtttaaaaattacagaagaggttggccacacagatctaatggctgcttatgtagacaattctagtcttactattaagaaacctaatgaattatctagagtattaggtttgaaaacccttgctactcatggtttagctgctgttaatagtgtcccttgggatactatagctaattatgctaagccttttcttaacaaagttgttagtacaactactaacatagttacacggtgtttaaaccgtgtttgtactaattatatgccttatttctttactttattgctacaattgtgtacttttactagaagtacaaattctagaattaaagcatctatgccgactactatagcaaagaatactgttaagagtgtcggtaaattttgtctagaggcttcatttaattatttgaagtcacctaatttttctaaactgataaatattataatttggtttttactattaagtgtttgcctaggttctttaatctactcaaccgctgctttaggtgttttaatgtctaatttaggcatgccttcttactgtactggttacagagaaggctatttgaactctactaatgtcactattgcaacctactgtactggttctataccttgtagtgtttgtcttagtggtttagattctttagacacctatccttctttagaaactatacaaattaccatttcatcttttaaatgggatttaactgcttttggcttagttgcagagtggtttttggcatatattcttttcactaggtttttctatgtacttggattggctgcaatcatgcaattgtttttcagctattttgcagtacattttattagtaattcttggcttatgtggttaataattaatcttgtacaaatggccccgatttcagctatggttagaatgtacatcttctttgcatcattttattatgtatggaaaagttatgtgcatgttgtagacggttgtaattcatcaacttgtatgatgtgttacaaacgtaatagagcaacaagagtcgaatgtacaactattgttaatggtgttagaaggtccttttatgtctatgctaatggaggtaaaggcttttgcaaactacacaattggaattgtgttaattgtgatacattctgtgctggtagtacatttattagtgatgaagttgcgagagacttgtcactacagtttaaaagaccaataaatcctactgaccagtcttcttacatcgttgatagtgttacagtgaagaatggttccatccatctttactttgataaagctggtcaaaagacttatgaaagacattctctctctcattttgttaacttagacaacctgagagctaataacactaaaggttcattgcctattaatgttatagtttttgatggtaaatcaaaatgtgaagaatcatctgcaaaatcagcgtctgtttactacagtcagcttatgtgtcaacctatactgttactagatcaggcattagtgtctgatgttggtgatagtgcggaagttgcagttaaaatgtttgatgcttacgttaatacgttttcatcaacttttaacgtaccaatggaaaaactcaaaacactagttgcaactgcagaagctgaacttgcaaagaatgtgtccttagacaatgtcttatctacttttatttcagcagctcggcaagggtttgttgattcagatgtagaaactaaagatgttgttgaatgtcttaaattgtcacatcaatctgacatagaagttactggcgatagttgtaataactatatgctcacctataacaaagttgaaaacatgacaccccgtgaccttggtgcttgtattgactgtagtgcgcgtcatattaatgcgcaggtagcaaaaagtcacaacattgctttgatatggaacgttaaagatttcatgtcattgtctgaacaactacgaaaacaaatacgtagtgctgctaaaaagaataacttaccttttaagttgacatgtgcaactactagacaagttgttaatgttgtaacaacaaagatagcacttaagggtggtaaaattgttaataattggttgaagcagttaattaaagttacacttgtgttcctttttgttgctgctattttctatttaataacacctgttcatgtcatgtctaaacatactgacttttcaagtgaaatcataggatacaaggctattgatggtggtgtcactcgtgacatagcatctacagatacttgttttgctaacaaacatgctgattttgacacatggtttagccagcgtggtggtagttatactaatgacaaagcttgcccattgattgctgcagtcataacaagagaagtgggttttgtcgtgcctggtttgcctggcacgatattacgcacaactaatggtgactttttgcatttcttacctagagtttttagtgcagttggtaacatctgttacacaccatcaaaacttatagagtacactgactttgcaacatcagcttgtgttttggctgctgaatgtacaatttttaaagatgcttctggtaagccagtaccatattgttatgataccaatgtactagaaggttctgttgcttatgaaagtttacgccctgacacacgttatgtgctcatggatggctctattattcaatttcctaacacctaccttgaaggttctgttagagtggtaacaacttttgattctgagtactgtaggcacggcacttgtgaaagatcagaagctggtgtttgtgtatctactagtggtagatgggtacttaacaatgattattacagatctttaccaggagttttctgtggtgtagatgctgtaaatttacttactaatatgtttacaccactaattcaacctattggtgctttggacatatcagcatctatagtagctggtggtattgtagctatcgtagtaacatgccttgcctactattttatgaggtttagaagagcttttggtgaatacagtcatgtagttgcctttaatactttactattccttatgtcattcactgtactctgtttaacaccagtttactcattcttacctggtgtttattctgttatttacttgtacttgacattttatcttactaatgatgtttcttttttagcacatattcagtggatggttatgttcacacctttagtacctttctggataacaattgcttatatcatttgtatttccacaaagcatttctattggttctttactaattacctaaagagacgtgtagtctttaatggtgtttcctttagtacttttgaagaagctgcgctgtgcacctttttgttaaataaagaaatgtatctaaagttgcgtagtgatgtgctattacctcttacgcaatataatagatacttagctctttataataagtacaagtattttagtggagcaatggatacaactagctacagagaagctgcttgttgtcatctcgcaaaggctctcaatgacttcagtaactcaggttctgatgttctttaccaaccaccacaaacctctatcacctcagctgttttgcagagtggttttagaaaaatggcattcccatctggtaaagttgagggttgtatggtacaagtaacttgtggtacaactacacttaacggtctttggcttgatgacgtagtttactgtccaagacatgtgatctgcacctctgaagacatgcttaaccctaattatgaagatttactcattcgtaagtctaatcataatttcttggtacaggctggtaatgttcaactcagggttattggacattctatgcaaaattgtgtacttaagcttaaggttgatacagccaatcctaagacacctaagtataagtttgttcgcattcaaccaggacagactttttcagtgttagcttgttacaatggttcaccatctggtgtttaccaatgtgctatgaggcccaatttcactattaagggttcattccttaatggttcatgtggtagtgttggttttaacatagattatgactgtgtctctttttgttacatgcaccatatggaattaccaactggagttcatgctggcacagacttagaaggtaacttttatggaccttttgttgacaggcaaacagcacaagcagctggtacggacacaactattacagttaatgttttagcttggttgtacgctgctgttataaatggagacaggtggtttctcaatcgatttaccacaactcttaatgactttaaccttgtggctatgaagtacaattatgaacctctaacacaagaccatgttgacatactaggacctctttctgctcaaactggaattgccgttttagatatgtgtgcttcattaaaagaattactgcaaaatggtatgaatggacgtaccatattgggtagtgctttattagaagatgaatttacaccttttgatgttgttagacaatgctcaggtgttactttccaaagtgcagtgaaaagaacaatcaagggtacacaccactggttgttactcacaattttgacttcacttttagttttagtccagagtactcaatggtctttgttcttttttttgtatgaaaatgcctttttaccttttgctatgggtattattgctatgtctgcttttgcaatgatgtttgtcaaacataagcatgcatttctctgtttgtttttgttaccttctcttgccactgtagcttattttaatatggtctatatgcctgctagttgggtgatgcgtattatgacatggttggatatggttgatactagtttgtctggttttaagctaaaagactgtgttatgtatgcatcagctgtagtgttactaatccttatgacagcaagaactgtgtatgatgatggtgctaggagagtgtggacacttatgaatgtcttgacactcgtttataaagtttattatggtaatgctttagatcaagccatttccatgtgggctcttataatctctgttacttctaactactcaggtgtagttacaactgtcatgtttttggccaaaggtattgtttttatgtgtgttgagtattgccctattttcttcataactggtaatacacttcagtgtataatgctagtttattgtttcttaggctatttttgtacttgttactttggcctcttttgtttactcaaccgctactttagactgactcttggtgtttatgattacttagtttctacacaggagtttagatatatgaattcacagggactactcccacccaagaatagcatagatgccttcaaactcaacattaaattgttgggtgttggtggcaaaccttgtatcaaagtagccactgtacagtctaaaatgtcagatgtaaagtgcacatcagtagtcttactctcagttttgcaacaactcagagtagaatcatcatctaaattgtgggctcaatgtgtccagttacacaatgacattctcttagctaaagatactactgaagcctttgaaaaaatggtttcactactttctgttttgctttccatgcagggtgctgtagacataaacaagctttgtgaagaaatgctggacaacagggcaaccttacaagctatagcctcagagtttagttcccttccatcatatgcagcttttgctactgctcaagaagcttatgagcaggctgttgctaatggtgattctgaagttgttcttaaaaagttgaagaagtctttgaatgtggctaaatctgaatttgaccgtgatgcagccatgcaacgtaagttggaaaagatggctgatcaagctatgacccaaatgtataaacaggctagatctgaggacaagagggcaaaagttactagtgctatgcagacaatgcttttcactatgcttagaaagttggataatgatgcactcaacaacattatcaacaatgcaagagatggttgtgttcccttgaacataatacctcttacaacagcagccaaattaatggttgtcataccagactataacacatataaaaatacgtgtgatggtacaacatttacttatgcatcagcattgtgggaaatccaacaggttgtagatgcagatagtaaaattgttcaacttagtgaaattagtatggacaattcacctaatttagcatggcctcttattgtaacagctttaagggccaattctgctgtcaaattacagaataatgagcttagtcctgttgcactacgacagatgtcttgtgctgccggtactacacaaactgcttgcactgatgacaatgcgttagcttactacaacacaacaaagggaggtaggtttgtacttgcactgttatccgatttacaggatttgaaatgggctagattccctaagagtgatggaactggtactatctatacagaactggaaccaccttgtaggtttgttacagacacacctaaaggtcctaaagtgaagtatttatactttattaaaggattaaacaacctaaatagaggtatggtacttggtagtttagctgccacagtacgtctacaagctggtaatgcaacagaagtgcctgccaattcaactgtattatctttctgtgcttttgctgtagatgctgctaaagcttacaaagattatctagctagtgggggacaaccaatcactaattgtgttaagatgttgtgtacacacactggtactggtcaggcaataacagttacaccggaagccaatatggatcaagaatcctttggtggtgcatcgtgttgtctgtactgccgttgccacatagatcatccaaatcctaaaggattttgtgacttaaaaggtaagtatgtacaaatacctacaacttgtgctaatgaccctgtgggttttacacttaaaaacacagtctgtaccgtctgcggtatgtggaaaggttatggctgtagttgtgatcaactccgcgaacccatgcttcagtcagctgatgcacaatcgtttttaaacgggtttgcggtgtaagtgcagcccgtcttacaccgtgcggcacaggcactagtactgatgtcgtatacagggcttttgacatctacaatgataaagtagctggttttgctaaattcctaaaaactaattgttgtcgcttccaagaaaaggacgaagatgacaatttaattgattcttactttgtagttaagagacacactttctctaactaccaacatgaagaaacaatttataatttacttaaagattgtccagctgttgctaaacatgacttctttaagtttagaatagacggtgacatggtaccacatatatcacgtcaacgtcttactaaatacacaatggcagacctcgtctatgctttaaggcattttgatgaaggtaattgtgacacattaaaagaaatacttgtcacatacaattgttgtgatgatgattatttcaataaaaaggactggtatgattttgtagaaaacccagatatattacgcgtatacgccaacttaggtgaacgtgtacgccaagctttgttaaaaacagtacaattctgtgatgccatgcgaaatgctggtattgttggtgtactgacattagataatcaagatctcaatggtaactggtatgatttcggtgatttcatacaaaccacgccaggtagtggagttcctgttgtagattcttattattcattgttaatgcctatattaaccttgaccagggctttaactgcagagtcacatgttgacactgacttaacaaagccttacattaagtgggatttgttaaaatatgacttcacggaagagaggttaaaactctttgaccgttattttaaatattgggatcagacataccacccaaattgtgttaactgtttggatgacagatgcattctgcattgtgcaaactttaatgttttattctctacagtgttcccacttacaagttttggaccactagtgagaaaaatatttgttgatggtgttccatttgtagtttcaactggataccacttcagagagctaggtgttgtacataatcaggatgtaaacttacatagctctagacttagttttaaggaattacttgtgtatgctgctgaccctgctatgcacgctgcttctggtaatctattactagataaacgcactacgtgcttttcagtagctgcacttactaacaatgttgcttttcaaactgtcaaacccggtaattttaacaaagacttctatgactttgctgtgtctaagggtttctttaaggaaggaagttctgttgaattaaaacacttcttctttgctcaggatggtaatgctgctatcagcgattatgactactatcgttataatctaccaacaatgtgtgatatcagacaactactatttgtagttgaagttgttgataagtactttgattgttacgatggtggctgtattaatgctaaccaagtcatcgtcaacaacctagacaaatcagctggttttccatttaataaatggggtaaggctagactttattatgattcaatgagttatgaggatcaagatgcacttttcgcatatacaaaacgtaatgtcatccctactataactcaaatgaatcttaagtatgccattagtgcaaagaatagagctcgcaccgtagctggtgtctctatctgtagtactatgaccaatagacagtttcatcaaaaattattgaaatcaatagccgccactagaggagctactgtagtaattggaacaagcaaattctatggtggttggcacaacatgttaaaaactgtttatagtgatgtagaaaaccctcaccttatgggttgggattatcctaaatgtgatagagccatgcctaacatgcttagaattatggcctcacttgttcttgctcgcaaacatacaacgtgttgtagcttgtcacaccgtttctatagattagctaatgagtgtgctcaagtattgagtgaaatggtcatgtgtggcggttcactatatgttaaaccaggtggaacctcatcaggagatgccacaactgcttatgctaatagtgtttttaacatttgtcaagctgtcacggccaatgttaatgcacttttatctactgatggtaacaaaattgccgataagtatgtccgcaatttacaacacagactttatgagtgtctctatagaaatagagatgttgacacagactttgtgaatgagttttacgcatatttgcgtaaacatttctcaatgatgatactctctgacgatgctgttgtgtgtttcaatagcacttatgcatctcaaggtctagtggctagcataaagaactttaagtcagttctttattatcaaaacaatgtttttatgtctgaagcaaaatgttggactgagactgaccttactaaaggacctcatgaattttgctctcaacatacaatgctagttaaacagggtgatgattatgtgtaccttccttacccagatccatcaagaatcctaggggccggctgttttgtagatgatatcgtaaaaacagatggtacacttatgattgaacggttcgtgtctttagctatagatgcttacccacttactaaacatcctaatcaggagtatgctgatgtctttcatttgtacttacaatacataagaaagctacatgatgagttaacaggacacatgttagacatgtattctgttatgcttactaatgataacacttcaaggtattgggaacctgagttttatgaggctatgtacacaccgcatacagtcttacaggctgttggggcttgtgttctttgcaattcacagacttcattaagatgtggtgcttgcatacgtagaccattcttatgttgtaaatgctgttacgaccatgtcatatcaacatcacataaattagtcttgtctgttaatccgtatgtttgcaatgctctaggttgtgatgtcacagatgtgactcaactttacttaggaggtatgagctattattgtaaatcacataaaccacccattagttttccattgtgtgctaatggacaagtttttggtttatataaaaatacatgtgttggtagcgataatgttactgactttaatgcaattgcaacatgtgactggacaaatgctggtgattacattttagctaacacctgtactgaaagactcaagctttttgcagcagaaacgctcaaagctactgaggagacatttaaactgtcttatggtattgctactgtacgtgaagtgctgtctgacagagaattacatctttcatgggaagttggtaaacctagaccaccacttaaccgaaattatgtctttactggttatcgtgtaactaaaaacagtaaagtacaaataggagagtacacctttgaaaaaggtgactatggtgatgctgttgtttaccgaggtacaacaacttacaaattaaatgttggtgattattttgtgctgacatcacatacagtaatgccattaagtgcacctacactagtgccacaagagcactatgttagaattactggcttatacccaacactcaatatctcatatgagttttctagcaatgttgcaaattatcaaaaggttggtatgcaaaagtattctacactccagggaccacctggtactggtaagagtcattttgctattggcctagctctctactacccttctgctcgcatagtgtatacagcttgctctcatgccgctgttgatgcactatgtgagaaggcattaaaatatttgcctatagataaatgtagtagaattatacctgcacgtgctcgtgtagagtgttttgataaattcaaagtgaattcaacattagaacagtatgtcttttgtactgtaaatgcattgcctgagacgacagcagatatagttgtctttgatgaaatttcaatggccacaaattatgatttgagtgttgtcaatgccagattacgtgctaagcactatgtgtacattggcgaccctgctcaattacctgcaccacgcacattgctaactaagggcacactagaaccagaatatttcaattcagtgtgtagacttatgaaaactataggtccagacatgttcctcggaacttgtcggcgttgtcctgctgaaattgttgacactgtgagtgctttggtttatgataataagcttaaagcacataaagacaaatcagctcaatgctttaaaatgttttataagggtgttatcacgcatgatgtttcatctgcaattaacaggccacaaataggcgtggtaagagaattccttacacgtaaccctgcttggagaaaagctgtctttatttcaccttataattcacagaatgctgtagcctcaaagattttgggactaccaactcaaactgttgattcatcacagggctcagaatatgactatgtcatattcactcaaaccactgaaacagctcactcttgtaatgtaaacagatttaatgttgctattaccagagcaaaagtaggcatactttgcataatgtctgatagagacctttatgacaagttgcaatttacaagtcttgaaattccacgtaggaatgtggcaactttacaagctgaaaatgtaacaggactctttaaagattgtagtaaggtaatcactgggttacatcctacacaggcacctacacacctcagtgttgacactaaattcaaaactgaaggtttatgtgttgacatacctggcatacctaaggacatgacctatagaagactcatctctatgatgggttttaaaatgaattatcaagttaatggttaccctaacatgtttatcacccgcgaagaagctataagacatgtacgtgcatggattggcttcgatgtcgaggggtgtcatgctactagagaagctgttggtaccaatttacctttacagctaggtttttctacaggtgttaacctagttgctgtacctacaggttatgttgatacacctaataatacagatttttccagagttagtgctaaaccaccgcctggagatcaatttaaacacctcataccacttatgtacaaaggacttccttggaatgtagtgcgtataaagattgtacaaatgttaagtgacacacttaaaaatctctctgacagagtcgtatttgtcttatgggcacatggctttgagttgacatctatgaagtattttgtgaaaataggacctgagcgcacctgttgtctatgtgatagacgtgccacatgcttttccactgcttcagacacttatgcctgttggcatcattctattggatttgattacgtctataatccgtttatgattgatgttcaacaatggggttttacaggtaacctacaaagcaaccatgatctgtattgtcaagtccatggtaatgcacatgtagctagttgtgatgcaatcatgactaggtgtctagctgtccacgagtgctttgttaagcgtgttgactggactattgaatatcctataattggtgatgaactgaagattaatgcggcttgtagaaaggttcaacacatggttgttaaagctgcattattagcagacaaattcccagttcttcacgacattggtaaccctaaagctattaagtgtgtacctcaagctgatgtagaatggaagttctatgatgcacagccttgtagtgacaaagcttataaaatagaagaattattctattcttatgccacacattctgacaaattcacagatggtgtatgcctattttggaattgcaatgtcgatagatatcctgctaattccattgtttgtagatttgacactagagtgctatctaaccttaacttgcctggttgtgatggtggcagtttgtatgtaaataaacatgcattccacacaccagcttttgataaaagtgcttttgttaatttaaaacaattaccatttttctattactctgacagtccatgtgagtctcatggaaaacaagtagtgtcagatatagattatgtaccactaaagtctgctacgtgtataacacgttgcaatttaggtggtgctgtctgtagacatcatgctaatgagtacagattgtatctcgatgcttataacatgatgatctcagctggctttagcttgtgggtttacaaacaatttgatacttataacctctggaacacttttacaagacttcagagtttagaaaatgtggcttttaatgttgtaaataagggacactttgatggacaacagggtgaagtaccagtttctatcattaataacactgtttacacaaaagttgatggtgttgatgtagaattgtttgaaaataaaacaacattacctgttaatgtagcatttgagctttgggctaagcgcaacattaaaccagtaccagaggtgaaaatactcaataatttgggtgtggacattgctgctaatactgtgatctgggactacaaaagagatgctccagcacatatatctactattggtgtttgttctatgactgacatagccaagaaaccaactgaaacgatttgtgcaccactcactgtcttttttgatggtagagttgatggtcaagtagacttatttagaaatgcccgtaatggtgttcttattacagaaggtagtgttaaaggtttacaaccatctgtaggtcccaaacaagctagtcttaatggagtcacattaattggagaagccgtaaaaacacagttcaattattataagaaagttgatggtgttgtccaacaattacctgaaacttactttactcagagtagaaatttacaagaatttaaacccaggagtcaaatggaaattgatttcttagaattagctatggatgaattcattgaacggtataaattagaaggctatgccttcgaacatatcgtttatggagattttagtcatagtcagttaggtggtttacatctactgattggactagctaaacgttttaaggaatcaccttttgaattagaagattttattcctatggacagtacagttaaaaactatttcataacagatgcgcaaacaggttcatctaagtgtgtgtgttctgttattgatttattacttgatgattttgttgaaataataaaatcccaagatttatctgtagtttctaaggttgtcaaagtgactattgactatacagaaatttcatttatgctttggtgtaaagatggccatgtagaaacattttacccaaaattacaatctagtcaagcgtggcaaccgggtgttgctatgcctaatctttacaaaatgcaaagaatgctattagaaaagtgtgaccttcaaaattatggtgatagtgcaacattacctaaaggcataatgatgaatgtcgcaaaatatactcaactgtgtcaatatttaaacacattaacattagctgtaccctataatatgagagttatacattttggtgctggttctgataaaggagttgcaccaggtacagctgttttaagacagtggttgcctacgggtacgctgcttgtcgattcagatcttaatgactttgtctctgatgcagattcaactttgattggtgattgtgcaactgtacatacagctaataaatgggatctcattattagtgatatgtacgaccctaagactaaaaatgttacaaaagaaaatgactctaaagagggttttttcacttacatttgtgggtttatacaacaaaagctagctcttggaggttccgtggctataaagataacagaacattcttggaatgctgatctttataagctcatgggacacttcgcatggtggacagcctttgttactaatgtgaatgcgtcatcatctgaagcatttttaattggatgtaattatcttggcaaaccacgcgaacaaatagatggttatgtcatgcatgcaaattacatattttggaggaatacaaatccaattcagttgtcttcctattctttatttgacatgagtaaatttccccttaaattaaggggtactgctgttatgtctttaaaagaaggtcaaatcaatgatatgattttatctcttcttagtaaaggtagacttataattagagaaaacaacagagttgttatttctagtgatgttcttgttaacaactaaacgaacaatgtttgtttttcttgttttattgccactagtctctattcagtgtgttaatcttacaaccagaactcaattaccccctgcatacactaattctttcacacgtggtgtttattaccctgacaaagttttcagatcctcagttttacattcaactcaggacttgttcttacctttcttttccaatgttacttggttccatgctatacatgtctctgggaccaatggtactaagaggtttgataaccctgtcctaccatttaatgatggtgtttattttgcttccactgagaagtctaacataataagaggctggatttttggtactactttagattcgaagacccagtccctacttattgttaataacgctactaatgttgttattaaagtctgtgaatttcaattttgtaatgatccatttttgggtgtttattaccacaaaaacaacaaaagttgtatggaaagtgagttcagagtttattctagtgcgaataattgcacttttgaatatgtctctcagccttttcttatggaccttgaaggaaaacagggtaatttcaaaaatcttagggaatttgtgtttaagaatattgatggttattttaaaatatattctaagcacacgcctattaatttagtgcgtgatctccctcagggtttttcggctttagaaccattggtagatttgccaataggtattaacatcactaggtttcaaactttacttgctttacatagaagttatttgactcctggtgattcttcttcaggttggacagctggtgctgcagcttattatgtgggttatcttcaacctaggacttttctattaaaatataatgaaaatggaaccattacagatgctgtagactgtgcacttgaccctctctcagaaacaaagtgtacgttgaaatccttcactgtagaaaaaggaatctatcaaacttctaactttagagtccaaccaacagaatctattgttagatttcctaatattacaaacttgtgcccttttggtgaagtttttaacgccaccagatttgcatctgtttatgcttggaacaggaagagaatcagcaactgtgttgctgattattctgtcctatataattccgcatcattttccacttttaagtgttatggagtgtctcctactaaattaaatgatctctgctttactaatgtctatgcagattcatttgtaattagaggtgatgaagtcagacaaatcgctccagggcaaactggaaagattgctgattataattataaattaccagatgattttacaggctgcgttatagcttggaattctaacaatcttgattctaaggttggtggtaattataattaccggtatagattgtttaggaagtctaatctcaaaccttttgagagagatatttcaactgaaatctatcaggccggtagcacaccttgtaatggtgttgaaggttttaattgttactttcctttacaatcatatggtttccaacccactaatggtgttggttaccaaccatacagagtagtagtactttcttttgaacttctacatgcaccagcaactgtttgtggacctaaaaagtctactaatttggttaaaaacaaatgtgtcaatttcaacttcaatggtttaacaggcacaggtgttcttactgagtctaacaaaaagtttctgcctttccaacaatttggcagagacattgctgacactactgatgctgtccgtgatccacagacacttgagattcttgacattacaccatgttcttttggtggtgtcagtgttataacaccaggaacaaatacttctaaccaggttgctgttctttatcagggtgttaactgcacagaagtccctgttgctattcatgcagatcaacttactcctacttggcgtgtttattctacaggttctaatgtttttcaaacacgtgcaggctgtttaataggggctgaacatgtcaacaactcatatgagtgtgacatacccattggtgcaggtatatgcgctagttatcagactcagactaattctcctcggcgggcacgtagtgtagctagtcaatccatcattgcctacactatgtcacttggtgcagaaaattcagttgcttactctaataactctattgccatacccacaaattttactattagtgttaccacagaaattctaccagtgtctatgaccaagacatcagtagattgtacaatgtacatttgtggtgattcaactgaatgcagcaatcttttgttgcaatatggcagtttttgtacacaattaaaccgtgctttaactggaatagctgttgaacaagacaaaaacacccaagaagtttttgcacaagtcaaacaaatttacaaaacaccaccaattaaagattttggtggttttaatttttcacaaatattaccagatccatcaaaaccaagcaagaggtcatttattgaagatctacttttcaacaaagtgacacttgcagatgctggcttcatcaaacaatatggtgattgccttggtgatattgctgctagagacctcatttgtgcacaaaagtttaacggccttactgttttgccacctttgctcacagatgaaatgattgctcaatacacttctgcactgttagcgggtacaatcacttctggttggacctttggtgcaggtgctgcattacaaataccatttgctatgcaaatggcttataggtttaatggtattggagttacacagaatgttctctatgagaaccaaaaattgattgccaaccaatttaatagtgctattggcaaaattcaagactcactttcttccacagcaagtgcacttggaaaacttcaagatgtggtcaaccaaaatgcacaagctttaaacacgcttgttaaacaacttagctccaattttggtgcaatttcaagtgttttaaatgatatcctttcacgtcttgacaaagttgaggctgaagtgcaaattgataggttgatcacaggcagacttcaaagtttgcagacatatgtgactcaacaattaattagagctgcagaaatcagagcttctgctaatcttgctgctactaaaatgtcagagtgtgtacttggacaatcaaaaagagttgatttttgtggaaagggctatcatcttatgtccttccctcagtcagcacctcatggtgtagtcttcttgcatgtgacttatgtccctgcacaagaaaagaacttcacaactgctcctgccatttgtcatgatggaaaagcacactttcctcgtgaaggtgtctttgtttcaaatggcacacactggtttgtaacacaaaggaatttttatgaaccacaaatcattactacagacaacacatttgtgtctggtaactgtgatgttgtaataggaattgtcaacaacacagtttatgatcctttgcaacctgaattagactcattcaaggaggagttagataaatattttaagaatcatacatcaccagatgttgatttaggtgacatctctggcattaatgcttcagttgtaaacattcaaaaagaaattgaccgcctcaatgaggttgccaagaatttaaatgaatctctcatcgatctccaagaacttggaaagtatgagcagtatataaaatggccatggtacatttggctaggttttatagctggcttgattgccatagtaatggtgacaattatgctttgctgtatgaccagttgctgtagttgtctcaagggctgttgttcttgtggatcctgctgcaaatttgatgaagacgactctgagccagtgctcaaaggagtcaaattacattacacataaacgaacttatggatttgtttatgagaatcttcacaattggaactgtaactttgaagcaaggtgaaatcaaggatgctactccttcagattttgttcgcgctactgcaacgataccgatacaagcctcactccctttcggatggcttattgttggcgttgcacttcttgctgtttttcatagcgcttccaaaatcataaccctcaaaaagagatggcaactagcactctccaagggtgttcactttgtttgcaacttgctgttgttgtttgtaacagtttactcacaccttttgctcgttgctgctggccttgaagccccttttctctatctttatgctttagtctacttcttgcagagtataaactttgtaagaataataatgaggctttggctttgctggaaatgccgttccaaaaacccattactttatgatgccaactattttctttgctggcatactaattgttacgactattgtataccttacaatagtgtaacttcttcaattgtcattacttcaggtgatggcacaacaagtcctatttctgaacatgactaccagattggtggttatactgaaaaatgggaatctggagtaaaagactgtgttgtattacacagttacttcacttcagactattaccagctgtactcaactcaattgagtacagacactggtgttgaacatgttaccttcttcatctacaataaaattgttgatgagcctgaagaacatgtccaaattcacacaatcgacggttcatccggagttgttaatccagtaatggaaccaatttatgatgaaccgacgacgactactagcgtgcctttgtaagcacaagctgatgagtacgaacttatgtactcattcgtttcggaagagacaggtacgttaatagttaatagcgtacttctttttcttgctttcgtggtattcttgctagttacactagccatccttactgcgcttcgattgtgtgcgtactgctgcaatattgttaacgtgagtcttgtaaaaccttctttttacgtttactctcgtgttaaaaatctgaattcttctagagttcctgatcttctggtctaaacgaactaaatattatattagtttttctgtttggaactttaattttagccatggtagattccaacggtactattaccgttgaagagcttaaaaagctccttgaacaatggaacctagtaataggtttcctattccttacatggatttgtcttctacaatttgcctatgccaacaggaataggtttttgtatataattaagttaatttttctctggctgttatggccagtaactttagcttgttttgtgcttgctgctgtttacagaataaattggatcaccggtggaattgctatcgcaatggcttgtcttgtaggcttgatgtggctcagctacttcattgcttctttcagactgtttgcgcgtacgcgttccatgtggtcattcaatccagaaactaacattcttctcaacgtgccactccatggcactattctgaccagaccgcttctagaaagtgaactcgtaatcggagctgtgatccttcgtggacatcttcgtattgctggacaccatctaggacgctgtgacatcaaggacctgcctaaagaaatcactgttgctacatcacgaacgctttcttattacaaattgggagcttcgcagcgtgtagcaggtgactcaggttttgctgcatacagtcgctacaggattggcaactataaattaaacacagaccattccagtagcagtgacaatattgctttgcttgtacagtaagtgacaacagatgtttcatctcgttgactttcaggttactatagcagagatattactaattattatgaggacttttaaagtttccatttggaatcttgattacatcataaacctcataattaaaaatttatctaagtcactaactgagaataaatattctcaattagatgaagagcaaccaatggagattgattaaacgaacatgaaaattattcttttcttggcactgataacactcgctacttgtgagctttatcactaccaagagtgtgttagaggtacaacagtacttttaaaagaaccttgctcttctggaacatacgagggcaattcaccatttcatcctctagctgataacaaatttgcactgacttgctttagcactcaatttgcttttgcttgtcctgacggcgtaaaacacgtctatcagttacgtgccagatcagtttcacctaaactgttcatcagacaagaggaagttcaagaactttactctccaatttttcttattgttgcggcaatagtgtttataacactttgcttcacactcaaaagaaagacagaatgattgaactttcattaattgacttctatttgtgctttttagcctttctgctattccttgttttaattatgcttattatcttttggttctcacttgaactgcaagatcataatgaaacttgtcacgcctaaacgaacatgaaatttcttgttttcttaggaatcatcacaactgtagctgcatttcaccaagaatgtagtttacagtcatgtactcaacatcaaccatatgtagttgatgacccgtgtcctattcacttctattctaaatggtatattagagtaggagctagaaaatcagcacctttaattgaattgtgcgtggatgaggctggttctaaatcacccattcagtacatcgatatcggtaattatacagtttcctgtttaccttttacaattaattgccaggaacctaaattgggtagtcttgtagtgcgttgttcgttctatgaagactttttagagtatcatgacgttcgtgttgttttagatttcatctaaacgaacaaactataatgtctgataatggaccccaaaatcagcgaaatgcaccccgcattacgtttggtggaccctcagattcaactggcagtaaccagaatggagaacgcagtggggcgcgatcaaaacaacgtcggccccaaggtttacccaataatactgcgtcttggttcaccgctctcactcaacatggcaaggaagaccttaaattccctcgaggacaaggcgttccaattaacaccaatagcagtccagatgaccaaattggctactaccgaagagctaccagacgaattcgtggtggtgacggtaaaatgaaagatctcagtccaagatggtatttctactacctaggaactgggccagaagctggacttccctatggtgctaacaaagacggcatcatatgggttgcaactgagggagccttgaatacaccaaaagatcacattggcacccgcaatcctgctaacaatgctgcaatcgtgctacaacttcctcaaggaacaacattgccaaaaggcttctacgcagaagggagcagaggcggcagtcaagcctcttctcgttcctcatcacgtagtcgcaacagttcaagaaattcaactccaggcagcagtaggggaatttctcctgctagaatggctggcaatggcggtgatgctgctcttgctttgctgctgcttgacagattgaaccagcttgagagcaaaatgtctggtaaaggccaacaacaacaaggccaaactgtcactaagaaatctgctgctgaggcttctaagaagcctcggcaaaaacgtactgccactaaagcatacaatgtaacacaagctttcggcagacgtggtccagaacaaacccaaggaaattttggggaccaggaactaatcagacaaggaactgattacaaacattggccgcaaattgcacaatttgcccccagcgcttcagcgttcttcggaatgtcgcgcattggcatggaagtcacaccttcgggaacgtggttgacctacacaggtgccatcaaattggatgacaaagatccaaatttcaaagatcaagtcattttgctgaataagcatattgacgcatacaaaacatttccaccaacagagcctaaaaaggacaaaaagaagaaggctgatgaaactcaagccttaccgcagagacagaagaaacagcaaactgtgactcttcttcctgctgcagatttggatgatttctccaaacaattgcaacaatccatgagcagtgctgactcaactcaggcctaaactcatgcagaccacacaaggcagatgggctatataaacgttttcgcttttccgtttacgatatatagtctactcttgtgcagaatgaattctcgtaactacatagcacaagtagatgtagttaactttaatctcacatagcaatctttaatcagtgtgtaacattagggaggacttgaaagagccaccacattttcaccgaggccacgcggagtacgatcgagtgtacagtgaacaatgctagggagagctgcctatatggaagagccctaatgtgtaaaattaattttagtagtgctatcc

SEQ ID NO: 25 - protein, 1273 aa, SARS-CoV2
MFVFLVLLPLVSIQCVNLTTRTQLPPAYTNSFTRGVYYPDKVFRSSVLHSTQDLFLPFFSNVTWFHAIHVSGTNGTKRFDNPVLPFNDGVYFASTEKSNIIRGWIFGTTLDSKTQSLLIVNNATNVVIKVCEFQFCNDPFLGVYYHKNNKSCMESEFRVYSSANNCTFEYVSQPFLMDLEGKQGNFKNLREFVFKNIDGYFKIYSKHTPINLVRDLPQGFSALEPLVDLPIGINITRFQTLLALHRSYLTPGDSSSGWTAGAAAYYVGYLQPRTFLLKYNENGTITDAVDCALDPLSETKCTLKSFTVEKGIYQTSNFRVQPTESIVRFPNITNLCPFGEVFNATRFASVYAWNRKRISNCVADYSVLYNSASFSTFKCYGVSPTKLNDLCFTNVYADSFVIRGDEVRQIAPGQTGKIADYNYKLPDDFTGCVIAWNSNNLDSKVGGNYNYRYRLFRKSNLKPFERDISTEIYQAGSTPCNGVEGFNCYFPLQSYGFQPTNGVGYQPYRVVVLSFELLHAPATVCGPKKSTNLVKNKCVNFNFNGLTGTGVLTESNKKFLPFQQFGRDIADTTDAVRDPQTLEILDITPCSFGGVSVITPGTNTSNQVAVLYQGVNCTEVPVAIHADQLTPTWRVYSTGSNVFQTRAGCLIGAEHVNNSYECDIPIGAGICASYQTQTNSPRRARSVASQSIIAYTMSLGAENSVAYSNNSIAIPTNFTISVTTEILPVSMTKTSVDCTMYICGDSTECSNLLLQYGSFCTQLNRALTGIAVEQDKNTQEVFAQVKQIYKTPPIKDFGGFNFSQILPDPSKPSKRSFIEDLLFNKVTLADAGFIKQYGDCLGDIAARDLICAQKFNGLTVLPPLLTDEMIAQYTSALLAGTITSGWTFGAGAALQIPFAMQMAYRFNGIGVTQNVLYENQKLIANQFNSAIGKIQDSLSSTASALGKLQDVVNQNAQALNTLVKQLSSNFGAISSVLNDILSRLDKVEAEVQIDRLITGRLQSLQTYVTQQLIRAAEIRASANLAATKMSECVLGQSKRVDFCGKGYHLMSFPQSAPHGVVFLHVTYVPAQEKNFTTAPAICHDGKAHFPREGVFVSNGTHWFVTQRNFYEPQIITTDNTFVSGNCDVVIGIVNNTVYDPLQPELDSFKEELDKYFKNHTSPDVDLGDISGINASVVNIQKEIDRLNEVAKNLNESLIDLQELGKYEQYIKWPWYIWLGFIAGLIAIVMVTIMLCCMTSCCSCLKGCCSCGSCCKFDEDDSEPVLKGVKLHYT

SEQ ID NO: 26 - DNA, 29816 bp, SARS-CoV2
actttcgatctcttgtagatctgttctctaaacgaactttaaaatctgtgtggctgtcactcggctgcatgcttagtgcactcacgcagtataattaataactaattactgtcgttgacaggacacgagtaactcgtctatcttctgcaggctgcttacggtttcgtccgtgttgcagccgatcatcagcacatctaggttttgtccgggtgtgaccgaaaggtaagatggagagccttgtccctggtttcaacgagaaaacacacgtccaactcagtttgcctgttttacaggttcgcgacgtgctcgtacgtggctttggagactccgtggaggaggtcttatcagaggcacgtcaacatcttaaagatggcacttgtggcttagtagaagttgaaaaaggcgttttgcctcaacttgaacagccctatgtgttcatcaaacgttcggatgctcgaactgcacctcatggtcatgttatggttgagctggtagcagaactcgaaggcattcagtacggtcgtagtggtgagacacttggtgtccttgtccctcatgtgggcgaaataccagtggcttaccgcaaggttcttcttcgtaagaacggtaataaaggagctggtggccatagttacggcgccgatctaaagtcatttgacttaggcgacgagcttggcactgatccttatgaagattttcaagaaaactggaacactaaacatagcagtggtgttacccgtgaactcatgcgtgagcttaacggaggggcatacactcgctatgtcgataacaacttctgtggccctgatggctaccctcttgagtgcattaaagaccttctagcacgtgctggtaaagcttcatgcactttgtccgaacaactggactttattgacactaagaggggtgtatactgctgccgtgaacatgagcatgaaattgcttggtacacggaacgttctgaaaagagctatgaattgcagacaccttttgaaattaaattggcaaagaaatttgacatcttcaatggggaatgtccaaattttgtatttcccttaaattccataatcaagactattcaaccaagggttgaaaagaaaaagcttgatggctttatgggtagaattcgatctgtctatccagttgcgtcaccaaatgaatgcaaccaaatgtgcctttcaactctcatgaagtgtgatcattgtggtgaaacttcatggcagacgggcgattttgttaaagccacttgcgaattttgtggcactgagaatttgactaaagaaggtgccactacttgtggttacttaccccaaaatgctgttgttaaaatttattgtccagcatgtcacaattcagaagtaggacctgagcatagtcttgccgaataccataatgaatctggcttgaaaaccattcttcgtaagggtggtcgcactattgcctttggaggctgtgtgttctcttatgttggttgccataacaagtgtgcctattgggttccacgtgctagcgctaacataggttgtaaccatacaggtgttgttggagaaggttccgaaggtcttaatgacaaccttcttgaaatactccaaaaagagaaagtcaacatcaatattgttggtgactttaaacttaatgaagagatcgccattattttggcatctttttctgcttccacaagtgcttttgtggaaactgtgaaaggtttggattataaagcattcaaacaaattgttgaatcctgtggtaattttaaagttacaaaaggaaaagctaaaaaaggtgcctggaatattggtgaacagaaatcaatactgagtcctctttatgcatttgcatcagaggctgctcgtgttgtacgatcaattttctcccgcactcttgaaactgctcaaaattctgtgcgtgttttacagaaggccgctataacaatactagatggaatttcacagtattcactgagactcattgatgctatgatgttcacatctgatttggctactaacaatctagttgtaatggcctacattacaggtggtgttgttcagttgacttcgcagtggctaactaacatctttggcactgtttatgaaaaactcaaacccgtccttgattggcttgaagagaagtttaaggaaggtgtagagtttcttagagacggttgggaaattgttaaatttatctcaacctgtgcttgtgaaattgtcggtggacaaattgtcacctgtgcaaaggaaattaaggagagtgttcagacattctttaagcttgtaaataaatttttggctttgtgtgctgactctatcattattggtggagctaaacttaaagccttgaatttaggtgaaacatttgttacgcactcaaagggattgtacagaaagtgtgttaaatccagagaagaaactggcctactcatgcctctaaaagccccaaaagaaattatcttcttagagggagaaacacttcccacagaagtgttaacagaggaagttgtcttgaaaactggtgatttacaaccattagaacaacctactagtgaagctgttgaagctccactggttggtacaccagtttgtattaacgggcttatgttgctcgaaatcaaagacacagaaaagtactgtgcccttgcacctaatatgatggtaacaaacaataccttcacactcaaaggcggtgcaccaacaaaggttacttttggtgatgacactgtgatagaagtgcaaggttacaagagtgtgaatatcacttttgaacttgatgaaaggattgataaagtacttaatgagaagtgctctgcctatacagttgaactcggtacagaagtaaatgagttcgcctgtgttgtggcagatgctgtcataaaaactttgcaaccagtatctgaattacttacaccactgggcattgatttagatgagtggagtatggctacatactacttatttgatgagtctggtgagtttaaattggcttcacatatgtattgttctttttaccctccagatgaggatgaagaagaaggtgattgtgaagaagaagagtttgagccatcaactcaatatgagtatggtactgaagatgattaccaaggtaaacctttggaatttggtgccacttctgctgctcttcaacctgaagaagagcaagaagaagattggttagatgatgatagtcaacaaactgttggtcaacaagacggcagtgaggacaatcagacaactactattcaaacaattgttgaggttcaacctcaattagagatggaacttacaccagttgttcagactattgaagtgaatagttttagtggttatttaaaacttactgacaatgtatacattaaaaatgcagacattgtggaagaagctaaaaaggtaaaaccaacagtggttgttaatgcagccaatgtttaccttaaacatggaggaggtgttgcaggagccttaaataaggctactaacaatgccatgcaagttgaatctgatgattacatagctactaatggaccacttaaagtgggtggtagttgtgttttaagcggacacaatcttgctaaacactgtcttcatgttgtcggcccaaatgttaacaaaggtgaagacattcaacttcttaagagtgcttatgaaaattttaatcagcacgaagttctacttgcaccattattatcagctggtatttttggtgctgaccctatacattctttaagagtttgtgtagatactgttcgcacaaatgtctacttagctgtctttgataaaaatctctatgacaaacttgtttcaagctttttggaaatgaagagtgaaaagcaagttgaacaaaagatcgctgagattcctaaagaggaagttaagccatttataactgaaagtaaaccttcagttgaacagagaaaacaagatgataagaaaatcaaagcttgtgttgaagaagttacaacaactctggaagaaactaagttcctcacagaaaacttgttactttatattgacattaatggcaatcttcatccagattctgccactcttgttagtgacattgacatcactttcttaaagaaagatgctccatatatagtgggtgatgttgttcaagagggtgttttaactgctgtggttatacctactaaaaaggctggtggcactactgaaatgctagcgaaagctttgagaaaagtgccaacagacaattatataaccacttacccgggtcagggtttaaatggttacactgtagaggaggcaaagacagtgcttaaaaagtgtaaaagtgccttttacattctaccatctattatctctaatgagaagcaagaaattcttggaactgtttcttggaatttgcgagaaatgcttgcacatgcagaagaaacacgcaaattaatgcctgtctgtgtggaaactaaagccatagtttcaactatacagcgtaaatataagggtattaaaatacaagagggtgtggttgattatggtgctagattttacttttacaccagtaaaacaactgtagcgtcacttatcaacacacttaacgatctaaatgaaactcttgttacaatgccacttggctatgtaacacatggcttaaatttggaagaagctgctcggtatatgagatctctcaaagtgccagctacagtttctgtttcttcacctgatgctgttacagcgtataatggttatcttacttcttcttctaaaacacctgaagaacattttattgaaaccatctcacttgctggttcctataaagattggtcctattctggacaatctacacaactaggtatagaatttcttaagagaggtgataaaagtgtatattacactagtaatcctaccacattccacctagatggtgaagttatcacctttgacaatcttaagacacttctttctttgagagaagtgaggactattaaggtgtttacaacagtagacaacattaacctccacacgcaagttgtggacatgtcaatgacatatggacaacagtttggtccaacttatttggatggagctgatgttactaaaataaaacctcataattcacatgaaggtaaaacattttatgttttacctaatgatgacactctacgtgttgaggcttttgagtactaccacacaactgatcctagttttctgggtaggtacatgtcagcattaaatcacactaaaaagtggaaatacccacaagttaatggtttaacttctattaaatgggcagataacaactgttatcttgccactgcattgttaacactccaacaaatagagttgaagtttaatccacctgctctacaagatgcttattacagagcaagggctggtgaagctgctaacttttgtgcacttatcttagcctactgtaataagacagtaggtgagttaggtgatgttagagaaacaatgagttacttgtttcaacatgccaatttagattcttgcaaaagagtcttgaacgtggtgtgtaaaacttgtggacaacagcagacaacccttaagggtgtagaagctgttatgtacatgggcacactttcttatgaacaatttaagaaaggtgttcagataccttgtacgtgtggtaaacaagctacaaaatatctagtacaacaggagtcaccttttgttatgatgtcagcaccacctgctcagtatgaacttaagcatggtacatttacttgtgctagtgagtacactggtaattaccagtgtggtcactataaacatataacttctaaagaaactttgtattgcatagacggtgctttacttacaaagtcctcagaatacaaaggtcctattacggatgttttctacaaagaaaacagttacacaacaaccataaaaccagttacttataaattggatggtgttgtttgtacagaaattgaccctaagttggacaattattataagaaagacaattcttatttcacagagcaaccaattgatcttgtaccaaaccaaccatatccaaacgcaagcttcgataattttaagtttgtatgtgataatatcaaatttgctgatgatttaaaccagttaactggttataagaaacctgcttcaagagagcttaaagttacatttttccctgacttaaatggtgatgtggtggctattgattataaacactacacaccctcttttaagaaaggagctaaattgttacataaacctattgtttggcatgttaacaatgcaactaataaagccacgtataaaccaaatacctggtgtatacgttgtctttggagcacaaaaccagttgaaacatcaaattcgtttgatgtactgaagtcagaggacgcgcagggaatggataatcttgcctgcgaagatctaaaaccagtctctgaagaagtagtggaaaatcctaccatacagaaagacgttcttgagtgtaatgtgaaaactaccgaagttgtaggagacattatacttaaaccagcaaataatagtttaaaaattacagaagaggttggccacacagatctaatggctgcttatgtagacaattctagtcttactattaagaaacctaatgaattatctagagtattaggtttgaaaacccttgctactcatggtttagctgctgttaatagtgtcccttgggatactatagctaattatgctaagccttttcttaacaaagttgttagtacaactactaacatagttacacggtgtttaaaccgtgtttgtactaattatatgccttatttctttactttattgctacaattgtgtacttttactagaagtacaaattctagaattaaagcatctatgccgactactatagcaaagaatactgttaagagtgtcggtaaattttgtctagaggcttcatttaattatttgaagtcacctaatttttctaaactgataaatattataatttggtttttactattaagtgtttgcctaggttctttaatctactcaaccgctgctttaggtgttttaatgtctaatttaggcatgccttcttactgtactggttacagagaaggctatttgaactctactaatgtcactattgcaacctactgtactggttctataccttgtagtgtttgtcttagtggtttagattctttagacacctatccttctttagaaactatacaaattaccatttcatcttttaaatgggatttaactgcttttggcttagttgcagagtggtttttggcatatattcttttcactaggtttttctatgtacttggattggctgcaatcatgcaattgtttttcagctattttgcagtacattttattagtaattcttggcttatgtggttaataattaatcttgtacaaatggccccgatttcagctatggttagaatgtacatcttctttgcatcattttattatgtatggaaaagttatgtgcatgttgtagacggttgtaattcatcaacttgtatgatgtgttacaaacgtaatagagcaacaagagtcgaatgtacaactattgttaatggtgttagaaggtccttttatgtctatgctaatggaggtaaaggcttttgcaaactacacaattggaattgtgttaattgtgatacattctgtgctggtagtacatttattagtgatgaagttgcgagagacttgtcactacagtttaaaagaccaataaatcctactgaccagtcttcttacatcgttgatagtgttacagtgaagaatggttccatccatctttactttgataaagctggtcaaaagacttatgaaagacattctctctctcattttgttaacttagacaacctgagagctaataacactaaaggttcattgcctattaatgttatagtttttgatggtaaatcaaaatgtgaagaatcatctgcaaaatcagcgtctgtttactacagtcagcttatgtgtcaacctatactgttactagatcaggcattagtgtctgatgttggtgatagtgcggaagttgcagttaaaatgtttgatgcttacgttaatacgttttcatcaacttttaacgtaccaatggaaaaactcaaaacactagttgcaactgcagaagctgaacttgcaaagaatgtgtccttagacaatgtcttatctacttttatttcagcagctcggcaagggtttgttgattcagatgtagaaactaaagatgttgttgaatgtcttaaattgtcacatcaatctgacatagaagttactggcgatagttgtaataactatatgctcacctataacaaagttgaaaacatgacaccccgtgaccttggtgcttgtattgactgtagtgcgcgtcatattaatgcgcaggtagcaaaaagtcacaacattgctttgatatggaacgttaaagatttcatgtcattgtctgaacaactacgaaaacaaatacgtagtgctgctaaaaagaataacttaccttttaagttgacatgtgcaactactagacaagttgttaatgttgtaacaacaaagatagcacttaagggtggtaaaattgttaataattggttgaagcagttaattaaagttacacttgtgttcctttttgttgctgctattttctatttaataacacctgttcatgtcatgtctaaacatactgacttttcaagtgaaatcataggatacaaggctattgatggtggtgtcactcgtgacatagcatctacagatacttgttttgctaacaaacatgctgattttgacacatggtttagccagcgtggtggtagttatactaatgacaaagcttgcccattgattgctgcagtcataacaagagaagtgggttttgtcgtgcctggtttgcctggcacgatattacgcacaactaatggtgactttttgcatttcttacctagagtttttagtgcagttggtaatatctgttacacaccatcaaaacttatagagtacactgactttgcaacatcagcttgtgttttggctgctgaatgtacaatttttaaagatgcttctggtaagccagtaccatattgttatgataccaatgtactagaaggttctgttgcttatgaaagtttacgccctgacacacgttatgtgctcatggatggctctattattcaatttcctaacacctaccttgaaggttctgttagagtggtaacaacttttgattctgagtactgtaggcacggcacttgtgaaagatcagaagctggtgtttgtgtatctactagtggtagatgggtacttaacaatgattattacagatctttaccaggagttttctgtggtgtagatgctgtaaatttacttactaatatgtttacaccactaattcaacctattggtgctttggacatatcagcatctatagtagctggtggtattgtagctatcgtagtaacatgccttgcctactattttatgaggtttagaagagcttttggtgaatacagtcatgtagttgcctttaatactttactattccttatgtcattcactgtactctgtttaacaccagtttactcattcttacctggtgtttattctgttatttacttgtacttgacattttatcttactaatgatgtttcttttttagcacatattcagtggatggttatgttcacacctttagtacctttctggataacaattgcttatatcatttgtatttccacaaagcatttctattggttctttagtaattacctaaagagacgtgtagtctttaatggtgtttcctttagtacttttgaagaagctgcgctgtgcacctttttgttaaataaagaaatgtatctaaagttgcgtagtgatgtgctattacctcttacgcaatataatagatacttagctctttataataagtacaagtattttagtggagcaatggatacaactagctacagagaagctgcttgttgtcatctcgcaaaggctctcaatgacttcagtaactcaggttctgatgttctttaccaaccaccacaaacctctatcacctcagctgttttgcagagtggttttagaaaaatggcattcccatctggtaaagttgagggttgtatggtacaagtaacttgtggtacaactacacttaacggtctttggcttgatgacgtagtttactgtccaagacatgtgatctgcacctctgaagacatgcttaaccctaattatgaagatttactcattcgtaagtctaatcataatttcttggtacaggctggtaatgttcaactcagggttattggacattctatgcaaaattgtgtacttaagcttaaggttgatacagccaatcctaagacacctaagtataagtttgttcgcattcaaccaggacagactttttcagtgttagcttgttacaatggttcaccatctggtgtttaccaatgtgctatgaggcccaatttcactattaagggttcattccttaatggttcatgtggtagtgttggttttaacatagattatgactgtgtctctttttgttacatgcaccatatggaattaccaactggagttcatgctggcacagacttagaaggtaacttttatggaccttttgttgacaggcaaacagcacaagcagctggtacggacacaactattacagttaatgttttagcttggttgtacgctgctgttataaatggagacaggtggtttctcaatcgatttaccacaactcttaatgactttaaccttgtggctatgaagtacaattatgaacctctaacacaagaccatgttgacatactaggacctctttctgctcaaactggaattgccgttttagatatgtgtgcttcattaaaagaattactgcaaaatggtatgaatggacgtaccatattgggtagtgctttattagaagatgaatttacaccttttgatgttgttagacaatgctcaggtgttactttccaaagtgcagtgaaaagaacaatcaagggtacacaccactggttgttactcacaattttgacttcacttttagttttagtccagagtactcaatggtctttgttcttttttttgtatgaaaatgcctttttaccttttgctatgggtattattgctatgtctgcttttgcaatgatgtttgtcaaacataagcatgcatttctctgtttgtttttgttaccttctcttgccactgtagcttattttaatatggtctatatgcctgctagttgggtgatgcgtattatgacatggttggatatggttgatactagtttgtctggttttaagctaaaagactgtgttatgtatgcatcagctgtagtgttactaatccttatgacagcaagaactgtgtatgatgatggtgctaggagagtgtggacacttatgaatgtcttgacactcgtttataaagtttattatggtaatgctttagatcaagccatttccatgtgggctcttataatctctgttacttctaactactcaggtgtagttacaactgtcatgtttttggccagaggtattgtttttatgtgtgttgagtattgccctattttcttcataactggtaatacacttcagtgtataatgctagtttattgtttcttaggctatttttgtacttgttactttggcctcttttgtttactcaaccgctactttagactgactcttggtgtttatgattacttagtttctacacaggagtttagatatatgaattcacagggactactcccacccaagaatagcatagatgccttcaaactcaacattaaattgttgggtgttggtggcaaaccttgtatcaaagtagccactgtacagtctaaaatgtcagatgtaaagtgcacatcagtagtcttactctcagttttgcaacaactcagagtagaatcatcatctaaattgtgggctcaatgtgtccagttacacaatgacattctcttagctaaagatactactgaagcctttgaaaaaatggtttcactactttctgttttgctttccatgcagggtgctgtagacataaacaagctttgtgaagaaatgctggacaacagggcaaccttacaagctatagcttcagagtttagttcccttccatcatatgcagcttttgctactgctcaagaagcttatgagcaggctgttgctaatggtgattctgaagttgttcttaaaaagttgaagaagtctttgaatgtggctaaatctgaatttgaccgtgatgcagccatgcaacgtaagttggaaaagatggctgatcaagctatgacccaaatgtataaacaggctagatctgaggacaagagggcaaaagttactagtgctatgcagacaatgcttttcactatgcttagaaagttggataatgatgcactcaacaacattatcaacaatgcaagagatggttgtgttcccttgaacataatacctcttacaacagcagccaaactaatggttgtcataccagactataacacatataaaaatacgtgtgatggtacaacatttacttatgcatcagcattgtgggaaatccaacaggttgtagatgcagatagtaaaattgttcaacttagtgaaattagtatggacaattcacctaatttagcatggcctcttattgtaacagctttaagggccaattctgctgtcaaattacagaataatgagcttagtcctgttgcactacgacagatgtcttgtgctgccggtactacacaaactgcttgcactgatgacaatgcgttagcttactacaacacaacaaagggaggtaggtttgtacttgcactgttatccgatttacaggatttgaaatgggctagattccctaagagtgatggaactggtactgtctatacagaactggaaccaccttgtaggtttgttacagacacacctaaaggtcctaaagtgaagtatttatactttattaaaggattaaacaacctaaatagaggtatggtacttggtagtttagctgccacagtacgtctacaagctggtaatgcaacagaagtgcctgccaattcaactgtattatctttctgtgcttttgctgtagatgctgctaaagcttacaaagattatctagctagtgggggacaaccaatcactaattgtgttaagatgttgtgtacacacactggtactggtcaggcaataacagttacaccggaagccaatatggatcaagaatcctttggtggtgcatcgtgttgtctgtactgccgttgccacatagatcatccaaatcctaaaggattttgtgacttaaaaggtaagtatgtacaaatacctacaacttgtgctaatgaccctgtgggttttacacttaaaaacacagtctgtaccgtctgcggtatgtggaaaggttatggctgtagttgtgatcaactccgcgaacccatgcttcagtcagctgatgcacaatcgtttttaaacgggtttgcggtgtaagtgcagcccgtcttacaccgtgcggcacaggcactagtactgatgtcgtatacagggcttttgacatctacaatgataaagtagctggttttgctaaattcctaaaaactaattgttgtcgcttccaagaaaaggacgaagatgacaatttaattgattcttactttgtagttaagagacacactttctctaactaccaacatgaagaaacaatttataatttacttaaggattgtccagctgttgctaaacatgacttctttaagtttagaatagacggtgacatggtaccacatatatcacgtcaacgtcttactaaatacacaatggcagacctcgtctatgctttaaggcattttgatgaaggtaattgtgacacattaaaagaaatacttgtcacatacaattgttgtgatgatgattatttcaataaaaaggactggtatgattttgtagaaaacccagatatattacgcgtatacgccaacttaggtgaacgtgtacgccaagctttgttaaaaacagtacaattctgtgatgccatgcgaaatgctggtattgttggtgtactgacattagataatcaagatctcaatggtaactggtatgatttcggtgatttcatacaaaccacgccaggtagtggagttcctgttgtagattcttattattcattgttaatgcctatattaaccttgaccagggctttaactgcagagtcacatgttgacactgacttaacaaagccttacattaagtgggatttgttaaaatatgacttcacggaagagaggttaaaactctttgaccgttattttaaatattgggatcagacataccacccaaattgtgttaactgtttggatgacagatgcattctgcattgtgcaaactttaatgttttattctctacagtgttcccacttacaagttttggaccactagtgagaaaaatatttgttgatggtgttccatttgtagtttcaactggataccacttcagagagctaggtgttgtacataatcaggatgtaaacttacatagctctagacttagttttaaggaattacttgtgtatgctgctgaccctgctatgcacgctgcttctggtaatctattactagataaacgcactacgtgcttttcagtagctgcacttactaacaatgttgcttttcaaactgtcaaacccggtaattttaacaaagacttctatgactttgctgtgtctaagggtttctttaaggaaggaagttctgttgaattaaaacacttcttctttgctcaggatggtaatgctgctatcagcgattatgactactatcgttataatctaccaacaatgtgtgatatcagacaactactatttgtagttgaagttgttgataagtactttgattgttacgatggtggctgtattaatgctaaccaagtcatcgtcaacaacctagacaaatcagctggttttccatttaataaatggggtaaggctagactttattatgattcaatgagttatgaggatcaagatgcacttttcgcatatacaaaacgtaatgtcatccctactataactcaaatgaatcttaagtatgccattagtgcaaagaatagagctcgcaccgtagctggtgtctctatctgtagtactatgaccaatagacagtttcatcaaaaattattgaaatcaatagccgccactagaggagctactgtagtaattggaacaagcaaattctatggtggttggcacaacatgttaaaaactgtttatagtgatgtagaaaaccctcaccttatgggttgggattatcctaaatgtgatagagccatgcctaacatgcttagaattatggcctcacttgttcttgctcgcaaacatacaacgtgttgtagcttgtcacaccgtttctatagattagctaatgagtgtgctcaagtattgagtgaaatggtcatgtgtggcggttcactatatgttaaaccaggtggaacctcatcaggagatgccacaactgcttatgctaatagtgtttttaacatttgtcaagctgtcacggccaatgttaatgcacttttatctactgatggtaacaaaattgccgataagtatgtccgcaatttacaacacagactttatgagtgtctctatagaaatagagatgttgacacagactttgtgaatgagttttacgcatatttgcgtaaacatttctcaatgatgatactctctgacgatgctgttgtgtgtttcaatagcacttatgcatctcaaggtctagtggctagcataaagaactttaagtcagttctttattatcaaaacaatgtttttatgtctgaagcaaaatgttggactgagactgaccttactaaaggacctcatgaattttgctctcaacatacaatgctagttaaacagggtgatgattatgtgtaccttccttacccagatccatcaagaatcctaggggccggctgttttgtagatgatatcgtaaaaacagatggtacacttatgattgaacggttcgtgtctttagctatagatgcttacccacttactaaacatcctaatcaggagtatgctgatgtctttcatttgtacttacaatacataagaaagctacatgatgagttaacaggacacatgttagacatgtattctgttatgcttactaatgataacacttcaaggtattgggaacctgagttttatgaggctatgtacacaccgcatacagtcttacaggctgttggggcttgtgttctttgcaattcacagacttcattaagatgtggtgcttgcatacgtagaccattcttatgttgtaaatgctgttacgaccatgtcatatcaacatcacataaattagtcttgtctgttaatccgtatgtttgcaatgctccaggttgtgatgtcacagatgtgactcaactttacttaggaggtatgagctattattgtaaatcacataaaccacccattagttttccattgtgtgctaatggacaagtttttggtttatataaaaatacatgtgttggtagcgataatgttactgactttaatgcaattgcaacatgtgactggacaaatgctggtgattacattttagctaacacctgtactgaaagactcaagctttttgcagcagaaacgctcaaagctactgaggagacatttaaactgtcttatggtattgctactgtacgtgaagtgctgtctgacagagaattacatctttcatgggaagttggtaaacctagaccaccacttaaccgaaattatgtctttactggttatcgtgtaactaaaaacagtaaagtacaaataggagagtacacctttgaaaaaggtgactatggtgatgctgttgtttaccgaggtacaacaacttacaaattaaatgttggtgattattttgtgctgacatcacatacagtaatgccattaagtgcacctacactagtgccacaagagcactatgttagaattactggcttatacccaacactcaatatctcatatgagttttctagcaatgttgcaaattatcaaaaggttggtatgcaaaagtattctacactccagggaccacctggtactggtaagagtcattttgctattggcctagctctctactacccttctgctcgcatagtgtatacagcttgctctcatgccgctgttgatgcactatgtgagaaggcattaaaatatttgcctatagataaatgtagtagaattatacctgcacgtgctcgtgtagagtgttttgataaattcaaagtgaattcaacattagaacagtatgtcttttgtactgtaaatgcattgcctgagacgacagcagatatagttgtctttgatgaaatttcaatggccacaaattatgatttgagtgttgtcaatgccagattacgtgctaagcactatgtgtacattggcgaccctgctcaattacctgcaccacgcacattgctaactaagggcacactagaaccagaatatttcaattcagtgtgtagacttatgaaaactataggtccagacatgttcctcggaacttgtcggcgttgtcctgctgaaattgttgacactgtgagtgctttggtttatgataataagcttaaagcacataaagacaaatcagctcaatgctttaaaatgttttataagggtgttatcacgcatgatgtttcatctgcaattaacaggccacaaataggcgtggtaagagaattccttacacgtaaccctgcttggagaaaagctgtctttatttcaccttataattcacagaatgctgtagcctcaaagattttgggactaccaactcaaactgttgattcatcacagggctcagaatatgactatgtcatattcactcaaaccactgaaacagctcactcttgtaatgtaaacagatttaatgttgctattaccagagcaaaagtaggcatactttgcataatgtctgatagagacctttatgacaagttgcaatttacaagtcttgaaattccacgtaggaatgtggcaactttacaagctgaaaatgtaacaggactctttaaagattgtagtaaggtaatcactgggttacatcctacacaggcacctacacacctcagtgttgacactaaattcaaaactgaaggtttatgtgttgacatacctggcatacctaaggacatgacctatagaagactcatctctatgatgggttttaaaatgaattatcaagttaatggttaccctaacatgtttatcacccgcgaagaagctataagacatgtacgtgcatggattggcttcgatgtcgaggggtgtcatgctactagagaagctgttggtaccaatttacctttacagctaggtttttctacaggtgttaacctagttgctgtacctacaggttatgttgatacacctaataatacagatttttccagagttagtgctaaaccaccgcctggagatcaatttaaacacctcataccacttatgtacaaaggacttccttggaatgtagtgcgtataaagattgtacaaatgttaagtgacacacttaaaaatctctctgacagagtcgtatttgtcttatgggcacatggctttgagttgacatctatgaagtattttgtgaaaataggacctgagcgcacctgttgtctatgtgatagacgtgccacatgcttttccactgcttcagacacttatgcctgttggcatcattctattggatttgattacgtctataatccgtttatgattgatgttcaacaatggggttttacaggtaacctacaaagcaaccatgatctgtattgtcaagtccatggtaatgcacatgtagctagttgtgatgcaatcatgactaggtgtctagctgtccacgagtgctttgttaagcgtgttgactggactattgaatatcctataattggtgatgaactgaagattaatgcggcttgtagaaaggttcaacacatggttgttaaagctgcattattagcagacaaattcccagttcttcacgacattggtaaccctaaagctattaagtgtgtacctcaagctgatgtagaatggaagttctatgatgcacagccttgtagtgacaaagcttataaaatagaagaattattctattcttatgccacacattctgacaaattcacagatggtgtatgcctattttggaattgcaatgtcgatagatatcctgctaattccattgtttgtagatttgacactagagtgctatctaaccttaacttgcctggttgtgatggtggcagtttgtatgtaaataaacatgcattccacacaccagcttttgataaaagtgcttttgttaatttaaaacaattaccatttttctattactctgacagtccatgtgagtctcatggaaaacaagtagtgtcagatatagattatgtaccactaaagtctgctacgtgtataacacgttgcaatttaggtggtgctgtctgtagacatcatgctaatgagtacagattgtatctcgatgcttataacatgatgatctcagctggctttagcttgtgggtttacaaacaatttgatacttataacctctggaacacttttacaagacttcagagtttagaaaatgtggcttttaatgttgtaaataagggacactttgatggacaacagggtgaagtaccagtttctatcattaataacactgtttacacaaaagttgatggtgttgatgtagaattgtttgaaaataaaacaacattacctgttaatgtagcatttgagctttgggctaagcgcaacattaaaccagtaccagaggtgaaaatactcaataatttgggtgtggacattgctgctaatactgtgatctgggactacaaaagagatgctccagcacatatatctactattggtgtttgttctatgactgacatagccaagaaaccaactgaaacgatttgtgcaccactcactgtcttttttgatggtagagttgatggtcaagtagacttatttagaaatgcccgtaatggtgttcttattacagaaggtagtgttaaaggtttacaaccatctgtaggtcccaaacaagctagtcttaatggagtcacattaattggagaagccgtaaaaacacagttcaattattataagaaagttgatggtgttgtccaacaattacctgaaacttactttactcagagtagaaatttacaagaatttaaacccaggagtcaaatggaaattgatttcttagaattagctatggatgaattcattgaacggtataaattagaaggctatgccttcgaacatatcgtttatggagattttagtcatagtcagttaggtggtttacatctactgattggactagctaaacgttttaaggaatcaccttttgaattagaagattttattcctatggacagtacagttaaaaactatttcataacagatgcgcaaacaggttcatctaagtgtgtgtgttctgttattgatttattacttgatgattttgttgaaataataaaatcccaagatttatctgtagtttctaaggttgtcaaagtgactattgactatacagaaatttcatttatgctttggtgtaaagatggccatgtagaaacattttacccaaaattacaatctagtcaagcgtggcaaccgggtgttgctatgcctaatctttacaaaatgcaaagaatgctattagaaaagtgtgaccttcaaaattatggtgatagtgcaacattacctaaaggcataatgatgaatgtcgcaaaatatactcaactgtgtcaatatttaaacacattaacattagctgtaccctataatatgagagttatacattttggtgctggttctgataaaggagttgcaccaggtacagctgttttaagacagtggttgcctacgggtacgctgcttgtcgattcagatcttaatgactttgtctctgatgcagattcaactttgattggtgattgtgcaactgtacatacagctaataaatgggatctcattattagtgatatgtacgaccctaagactaaaaatgttacaaaagaaaatgactctaaagagggttttttcacttacatttgtgggtttatacaacaaaagctagctcttggaggttccgtggctataaagataacagaacattcttggaatgctgatctttataagctcatgggacacttcgcatggtggacagcctttgttactaatgtgaatgcgtcatcatctgaagcatttttaattggatgtaattatcttggcaaaccacgcgaacaaatagatggttatgtcatgcatgcaaattacatattttggaggaatacaaatccaattcagttgtcttcctattctttatttgacatgagtaaatttccccttaaattaaggggtactgctgttatgtctttaaaagaaggtcaaatcaatgatatgattttatctcttcttagtaaaggtagacttataattagagaaaacaacagagttgttatttctagtgatgttcttgttaacaactaaacgaacaatgtttgtttttcttgttttattgccactagtctctattcagtgtgttaatcttacaaccagaactcaattaccccctgcatacactaattctttcacacgtggtgtttattaccctgacaaagttttcagatcctcagttttacattcaactcaggacttgttcttacctttcttttccaatgttacttggttccatgctatacatgtctctgggaccaatggtactaagaggtttgataaccctgtcctaccatttaatgatggtgtttattttgcttccactgagaagtctaacataataagaggctggatttttggtactactttagattcgaagacccagtccctacttattgttaataacgctactaatgttgttattaaagtctgtgaatttcaattttgtaatgatccatttttgggtgtttattaccacaaaaacaacaaaagttgtatggaaagtgagttcagagtttattctagtgcgaataattgcacttttgaatatgtctctcagccttttcttatggaccttgaaggaaaacagggtaatttcaaaaatcttagggaatttgtgtttaagaatattgatggttattttaaaatatattctaagcacacgcctattaatttagtgcgtgatctccctcagggtttttcggctttagaaccattggtagatttgccaataggtattaacatcactaggtttcaaactttacttgctttacatagaagttatttgactcctggtgattcttcttcaggttggacagctggtgctgcagcttattatgtgggttatcttcaacctaggacttttctattaaaatataatgaaaatggaaccattacagatgctgtagactgtgcacttgaccctctctcagaaacaaagtgtacgttgaaatccttcactgtagaaaaaggaatctatcaaacttctaactttagagtccaaccaacagaatctattgttagatttcctaatattacaaacttgtgcccttttggtgaagtttttaacgccaccagatttgcatctgtttatgcttggaacaggaagagaatcagcaactgtgttgctgattattctgtcctatataattccgcatcattttccacttttaagtgttatggagtgtctcctactaaattaaatgatctctgctttactaatgtctatgcagattcatttgtaattagaggtgatgaagtcagacaaatcgctccagggcaaactggaaagattgctgattataattataaattaccagatgattttacaggctgcgttatagcttggaattctaacaatcttgattctaaggttggtggtaattataattaccggtatagattgtttaggaagtctaatctcaaaccttttgagagagatatttcaactgaaatctatcaggccggtagcacaccttgtaatggtgttgaaggttttaattgttactttcctttacaatcatatggtttccaacccactaatggtgttggttaccaaccatacagagtagtagtactttcttttgaacttctacatgcaccagcaactgtttgtggacctaaaaagtctactaatttggttaaaaacaaatgtgtcaatttcaacttcaatggtttaacaggcacaggtgttcttactgagtctaacaaaaagtttctgcctttccaacaatttggcagagacattgctgacactactgatgctgtccgtgatccacagacacttgagattcttgacattacaccatgttcttttggtggtgtcagtgttataacaccaggaacaaatacttctaaccaggttgctgttctttatcagggtgttaactgcacagaagtccctgttgctattcatgcagatcaacttactcctacttggcgtgtttattctacaggttctaatgtttttcaaacacgtgcaggctgtttaataggggctgaacatgtcaacaactcatatgagtgtgacatacccattggtgcaggtatatgcgctagttatcagactcagactaattctcctcggcgggcacgtagtgtagctagtcaatccatcattgcctacactatgtcacttggtgcagaaaattcagttgcttactctaataactctattgccatacccacaaattttactattagtgttaccacagaaattctaccagtgtctatgaccaagacatcagtagattgtacaatgtacatttgtggtgattcaactgaatgcagcaatcttttgttgcaatatggcagtttttgtacacaattaaaccgtgctttaactggaatagctgttgaacaagacaaaaacacccaagaagtttttgcacaagtcaaacaaatttacaaaacaccaccaattaaagattttggtggttttaatttttcacaaatattaccagatccatcaaaaccaagcaagaggtcatttattgaagatctacttttcaacaaagtgacacttgcagatgctggcttcatcaaacaatatggtgattgccttggtgatattgctgctagagacctcatttgtgcacaaaagtttaacggccttactgttttgccacctttgctcacagatgaaatgattgctcaatacacttctgcactgttagcgggtacaatcacttctggttggacctttggtgcaggtgctgcattacaaataccatttgctatgcaaatggcttataggtttaatggtattggagttacacagaatgttctctatgagaaccaaaaattgattgccaaccaatttaatagcgctattggcaaaattcaagactcactttcttccacagcaagtgcacttggaaaacttcaagatgtggtcaaccaaaatgcacaagctttaaacacgcttgttaaacaacttagctccaattttggtgcaatttcaagtgttttaaatgatatcctttcacgtcttgacaaagttgaggctgaagtgcaaattgataggttgatcacaggcagacttcaaagtttgcagacatatgtgactcaacaattaattagagctgcagaaatcagagcttctgctaatcttgctgctactaaaatgtcagagtgtgtacttggacaatcaaaaagagttgatttttgtggaaagggctatcatcttatgtccttccctcagtcagcacctcatggtgtagtcttcttgcatgtgacttatgtccctgcacaagaaaagaacttcacaactgctcctgccatttgtcatgatggaaaagcacactttcctcgtgaaggtgtctttgtttcaaatggcacacactggtttgtaacacaaaggaatttttatgaaccacaaatcattactacagacaacacatttgtgtctggtaactgtgatgttgtaataggaattgtcaacaacacagtttatgatcctttgcaacctgaattagactcattcaaggaggagttagataaatattttaagaatcatacatcaccagatgttgatttaggtgacatctctggcattaatgcttcagttgtaaacattcaaaaagaaattgaccgcctcaatgaggttgccaagaatttaaatgaatctctcatcgatctccaagaacttggaaagtatgagcagtatataaaatggccatggtacatttggctaggttttatagctggcttgattgccatagtaatggtgacaattatgctttgctgtatgaccagttgctgtagttgtctcaagggctgttgttcttgtggatcctgctgcaaatttgatgaagacgactctgagccagtgctcaaaggagtcaaattacattacacataaacgaacttatggatttgtttatgagaatcttcacaattggaactgtaactttgaagcaaggtgaaatcaaggatgctactccttcagattttgttcgcgctactgcaacgataccgatacaagcctcactccctttcggatggcttattgttggcgttgcacttcttgctgtttttcatagcgcttccaaaatcataaccctcaaaaagagatggcaactagcactctccaagggtgttcactttgtttgcaacttgctgttgttgtttgtaacagtttactcacaccttttgctcgttgctgttggccttgaagccccttttctctatctttatgctttagtctacttcttgcagagtataaactttgtaagaataataatgaggctttggctttgctggaaatgccgttccaaaaacccattactttatgatgccaactattttctttgctggcatactaattgttacgactattgtataccttacaatagtgtaacttcttcaattgtcattacttcaggtgatggcacaacaagtcctatttctgaacatgactaccagattggtggttatactgaaaaatgggaatctggagtaaaagactgtgttgtattacacagttacttcacttcagactattaccagctgtactcaactcaattgagtacagacactggtgttgaacatgttaccttcttcatctacaataaaattgttgatgagcctgaagaacatgtccaaattcacacaatcgacggttcatccggagttgttaatccagtaatggaaccaatttatgatgaaccgacgacgactactagcgtgcctttgtaagcacaagctgatgagtacgaacttatgtactcattcgtttcggaagagacaggtacgttaatagttaatagcgtacttctttttcttgctttcgtggtattcttgctagttacactagccatccttactgcgcttcgattgtgtgcgtactgctgcaatattgttaacgtgagtcttgtaaaaccttctttttacgtttactctcgtgttaaaaatctgaattcttctagagttcctgatcttctggtctaaacgaactaaatattatattagtttttctgtttggaactttaattttagccatggcagattccaacggtactattaccgttgaagagcttaaaaagctccttgaacaatggaacctagtaataggtttcctattccttacatggatttgtcttctacaatttgcctatgccaacaggaataggtttttgtatataattaagttaatttttctctggctgttatggccagtaactttagcttgttttgtgcttgctgctgtttacagaataaattggatcaccggtggaattgctatcgcaatggcttgtcttgtaggcttgatgtggctcagctacttcattgcttctttcagactgtttgcgcgtacgcgttccatgtggtcattcaatccagaaactaacattcttctcaacgtgccactccatggcactattctgaccagaccgcttctagaaagtgaactcgtaatcggagctgtgatccttcgtggacatcttcgtattgctggacaccatctaggacgctgtgacatcaaggacctgcctaaagaaatcactgttgctacatcacgaacgctttcttattacaaattgggagcttcgcagcgtgtagcaggtgactcaggttttgctgcatacagtcgctacaggattggcaactataaattaaacacagaccattccagtagcagtgacaatattgctttgcttgtacagtaagtgacaacagatgtttcatctcgttgactttcaggttactatagcagagatattactaattattatgaggacttttaaagtttccatttggaatcttgattacatcataaacctcataattaaaaatttatctaagtcactaactgagaataaatattctcaattagatgaagagcaaccaatggagattgattaaacgaacatgaaaattattcttttcttggcactgataacactcgctacttgtgagctttatcactaccaagagtgtgttagaggtacaacagtacttttaaaagaaccttgctcttctggaacatacgagggcaattcaccatttcatcctctagctgataacaaatttgcactgacttgctttagcactcaatttgcttttgcttgtcctgacggcgtaaaacacgtctatcagttacgtgccagatcagtttcacctaaactgttcatcagacaagaggaagttcaagaactttactctccaatttttcttattgttgcggcaatagtgtttataacactttgcttcacactcaaaagaaagacagaatgattgaactttcattaattgacttctatttgtgctttttagcctttctgctattccttgttttaattatgcttattatcttttggttctcacttgaactgcaagatcataatgaaacttgtcacgcctaaactaacatgaaatttcttgttttcttaggaatcatcacaactgtagctgcatttcaccaagaatgtagtttacagtcatgtactcaacatcaaccatatgtagttgatgacccgtgtcctattcacttctattctaaatggtatattagagtaggagctagaaaatcagcacctttaattgaattgtgcgtggatgaggctggttctaaatcacccattcagtacatcgatatcggtaattatacagtttcctgtttaccttttacaattaattgccaggaacctaaattgggtagtcttgtagtgcgttgttcgttctatgaagactttttagagtatcatgacgttcgtgttgttttagatttcatctaaacgaacaaactataatgtctgataatggaccccaaaatcagcgaaatgcaccccgcattacgtttggtggaccctcagattcaactggcagtaaccagaatggagaacgcagtggggcgcgatcaaaacaacgtcggccccaaggtttacccaataatactgcgtcttggttcaccgctctcactcaacatggcaaggaagaccttaaattccctcgaggacaaggcgttccaattaacaccaatagcagtccagatgaccaaattggctactaccgaagagctaccagacgaattcgtggtggtgacggtaaaatgaaagatctcagtccaagatggtatttctactacctaggaactgggccagaagctggacttccctatggtgctaacaaagacggcatcatatgggttgcaactgagggagccttgaatacaccaaaagatcacattggcacccgcaatcctgctaacaatgctgcaatcgtgctacaacttcctcaaggaacaacattgccaaaaggcttctacgcagaagggagcagaggcggcagtcaagcctcttctcgttcctcatcacgtagtcgcaacagttcaagaaattcaactccaggcagcagtaggggaatttctcctgctagaatggctggcaatggcggtgatgctgctcttgctttgctgctgcttgacagattgaaccagcttgagagcaaaatgtctggtaaaggccaacaacaacaaggccaaactgtcactaagaaatctgctgctgaggcttctaagaagcctcggcaaaaacgtactgccactaaagcatacaatgtaacacaagctttcggcagacgtggtccagaacaaacccaaggaaattttggggaccaggaactaatcagacaaggaactgattacaaacattggccgcaaattgcacaatttgcccccagcgcttcagcgttcttcggaatgtcgcgcattggcatggaagtcacaccttcgggaacgtggttgacctacacaggtgccatcaaattggatgacaaagatccaaatttcaaagatcaagtcattttgctgaataagcatattgacgcatacaaaacatttccaccaacagagcctaaaaaggacaaaaagaagaaggctgatgaaactcaagccttaccgcagagacagaagaaacagcaaactgtgactcttcttcctgctgcagatttggatgatttctccaaacaattgcaacaatccatgagcagtgctgactcaactcaggcctaaactcatgcagaccacacaaggcagatgggctatataaacgttttcgcttttccgtttacgatatatagtctactcttgtgcagaatgaattctcgtaactacatagcacaagtagatgtagttaactttaatctcacatagcaatctttaatcagtgtgtaacattagggaggacttgaaagagccaccacattttcaccgaggccacgcggagtacgatcgagtgtacagtgaacaatgctagggagagctgcctatatggaagagccctaatgtgtaaaattaattttagtagtgctatccccatgtgattttaatagc

SEQ ID NO: 27 - protein, 1273 aa, SARS-CoV2; identical to SEQ ID NO: 25

SEQ ID NO: 28 - protein, 419 aa, SARS-CoV2
MSDNGPQNQRNAPRITFGGPSDSTGSNQNGERSGARSKQRRPQGLPNNTASWFTALTQHGKEDLKFPRGQGVPINTNSSPDDQIGYYRRATRRIRGGDGKMKDLSPRWYFYYLGTGPEAGLPYGANKDGIIWVATEGALNTPKDHIGTRNPANNAAIVLQLPQGTTLPKGFYAEGSRGGSQASSRSSSRSRNSSRNSTPGSSRGTSPARMAGNGGDAALALLLLDRLNQLESKMSGKGQQQQGQTVTKKSAAEASKKPRQKRTATKAYNVTQAFGRRGPEQTQGNFGDQELIRQGTDYKHWPQIAQFAPSASAFFGMSRIGMEVTPSGTWLTYTGAIKLDDKDPNFKDQVILLNKHIDAYKTFPPTEPKKDKKKKADETQALPQRQKKQQTVTLLPAADLDDFSKQLQQSMSSADSTQA

SEQ ID NO: 29 - protein, 222 aa, SARS-CoV2
MADSNGTITVEELKKLLEQWNLVIGFLFLTWICLLQFAYANRNRFLYIIKLIFLWLLWPVTLACFVLAAVYRINWITGGIAIAMACLVGLMWLSYFIASFRLFARTRSMWSFNPETNILLNVPLHGTILTRPLLESELVIGAVILRGHLRIAGHHLGRCDIKDLPKEITVATSRTLSYYKLGASQRVAGDSGFAAYSRYRIGNYKLNTDHSSSSDNIALLVQ
